United States Patent Application Publication US 2026/0258423 A1 - sequence listing, part 20

SEQ ID NO: 167803 - DNA, 46709983 bp, Homo sapiens (residues 21,686,783-23,354,996 of 46,709,983)
  source 1..46709983: mol_type = genomic DNA
cactctcatcagtcattaaggtgcatacctggtgttccagttattcagtgtggtataacaaactacctggaacttaatggcttgaaatagtcaccattacattatgattgtccattctctgcatcaataattaggatttggcaaagagggaatggtttgtttacagacagactccaatgtctgggaataacttgaaaatataaagatttctttttaaaaatgttatctttaaatttatttttattccatatatttaaggtgtacacaatgatgttttgatatacacatgaatttggatctatgttttaagatcaccgtctgtatctggtgaggggtaggagagaatagaagaatgctgctagagatggctccttaaacagaccagagaaaagagtctgaagtagtaacttagctagcatgtttaatctacatagagtataactagaaaatagtcatattctaggttgagatacaagaaatgggatgtgtaagagaaagataatgaagatgcagataaattctccattttcagtgttatttggttctacatagcatattggtaaaagactacaactacttatttttctctttatgatagcatcattgtaacacattttttaacccaaatgcatacatgattgtagcagtttgcttaataactcctttttattctgaggcttcccaggcaaatgctaagtgaacataaaatgaatgtatgttatctacacatttaatataaaaaataaaataaatgaatgagtggataaatgtagagtttttaaaacataaatgatttaatgcattcaataaaacatttttattataaatagttcagggataatttttaattccttatttccctaaaaataattcaagatcattattataaaaatattcaacaaaccactaatcatagaattaatatgaatgtagtaatcccttctgtaccttggagtcaaaatctaccacataattattaggcaattaatattttggaaaaaaagtttaaatatgctaattaaagtgtttgtttttaattgtaaagggtcattaccaagtaatgtgctggtaagtgtcacttacaaatggttaggaaatgaaagttatgaacaataaaattagttcaagttcattttttgtctaggaatattaaatgctttatcattacacttagttgtaacttcacttcatctgactccatattaatgatggcagggatttcagaaaaaaataagtatgatattcctcatggattgctcatcagagatattgattatgctcaattatttcctataaaggcaggattaaagtttatgagcacaaatgagagagcttggtttactatactgaacctttacttgagaatatgtatatcatatatatatgtaaatttttgttgctgttcagtgttattttggtcaatttaaatagtcaaatatggttattttctgctaaaatatcaaaatatcttaatcctctgtattattatgatcgttcattcattcaaaatttcttgagcaccttttaggtacttgaaataaaccactaaacacaacaaaagtttctttccttctcttgtagaacaacaaacacaaaataagtaaattatatgatgtgtttatatgtgataaatattatgaaaaatagaaacattagatgaaatagaggtttggggagtcaaggatgtgtatcatggtttataattataaagatattgatcagaatcaatacaggcctcattgggaagatgtcatttgagcaacaaataaaaggaggaaaaacactgatttgtgaggatatttgcaagttcataaagcagaagtgtgccttccctgtttgcgaaacctctgagatgttggtaagcctgaaatgagatattcaaggaaaaggtactgagggaaagaggatggtagagtgtgcagatatatgtaggaaactgtgggctactgtgaggaatttgcttatactctgactgaaatatggagccagtattaggttttgacatgatctgacagagtcactctaactaccgggttaagtgtaggtttgtaagagtggacttagggaaattaattaggaggccattgcagaaatacaaacgagatgacagcgtcgaggaccaacatgttagtaatggaggtggtgagcagtggccattttctgcatatttgcaatgtaaatgccgcagaatttcctggtggattggaaaagaaaagagatatgtgaaaaaggaaaaagaagagtcaagaaagaggcttgtttgggccaaacgaattggaagggccgcgtcgccatcagctggatgcatagaagactgcagcggagcaggtgtggcagggagtggtagggaggagcaaagcttctgttttaattaagtatgaaaacttaccacatatgtggaagtttctgttcattcaaaaaatgttttgtttgttttggtaaggctaacactgatttttttttaaagcatttggtttaatagtcatagaattgagtccatttctatcagagcattgtattgtggaaagaatttgccacgtgacttgttttggttcatggaagaagagatgaagtaacccacgccttgaaaagtgctcacccagtgagacttgccccactcttctctctgagatgcttttttgtcattgtatgaacaggtcggggataatattttaaaagatgagagaccactcagagaaagtgcctgagtgtcttagttccagctggaccctggagggaaaacatccaagaccacccaaccccgatcaaacaaacaaaccacctagccaagtaacagtcaaagaaaatcttgttgttttgttacgtgctactaattttttgagggaaattgcggggcacattgtgacgtagcaaaggttaattgatataaataccaaccaggttatttatctagttaacgtcattgatattataatctagatgattacaaaatctccaattcattgaaaaaagatgtaacttttgagaccagtaagacctgactttgaatctggagcttgatactttgcagttgcctgactctcatctcttaattttgccgcacttgatttgggccctaagaaaaaaatgggaacacaaccttgtacagcttttgtagatgaaataaactttataaataaaatatattcagcatatactacatgctcaacaaactattattattttattaattacatgtcattatttagacatcatgtaatgtacttattctgttttttacatttatattattattcttatttttaatattttgctgtcaaagctttagagcttagtactgagattctcaactgtcattaattacatttttgagcattttaataacattttatggaattccaatcagcgttgcaattcctagaaaaaaaatgattatcttgcttccttccttgtatatgtacccatagttgatctttctttcctggcagaactgtggggaaattgagtggcctttgaaggcattcatgacagcatctgtaaaagatttacagcacttaatctgtcagagatttgtccttagaattaaagagcagtaggatatctttagaccacaggtcgcatgcttagttacattcaaaatatcttgtaaaattagtttcaatgtcatcatactaatgcctatgtcagctttttaaaaacagtggcaatgatatacagccacctaaactttgactggagactataaaatagatggagtggtcaaatttagtcctaagtaaccttttattcaatgacagtaattacttatttgaacctttaattcatttaaatttgcttgaactttcaagtgactacccacgtattttccattttgacagataaaattcaatgactaatatgtagaacaacctacctaatgctttggtgtgattgacagttaaaaatcataaagcaccttttcctctgacagatttgaaaagctaaatctttaataagatcaatttacatttattacttttttcactatttttacagaaacattctccaaaataacaattaatgctccatgaatgagattcaagagatttgggaaaacatgaaaatgtcttgtatatatacactttgcttgtgagaattccaaagttttcatcatttttaaagtttttgtgtgtgtgaccctggtgaaattacagtcactgctttaatgacattgtaaacatctgttaatcaaataacaagtgatcttaccaaaaatatattacaaatgtatcgctccagtgaaagaatcatatagaaatattcttcttaatttttcctcccaaatgtttttctctaactcacttgcatcggttataatgtatggacatattcattgacataaaatggatgtatttattgaataaaatcctttgaaatggtttgctttaagcgggctgctaaaaaaaatcatgttttagttttacatttgtatttttgtcatttctcgtagagcagatgacaaatcagccatctattggctcactatcccgaattttggaatagtgactttgtccttgaacacattctctgagattgtggtagtgcagccacattttcgcccagaactaatactcagaaagtcgatggaattgcactgtttttgagagctttcagtcaggttgctatgggagtgattataaggagtaaagcttcctatggtttcactgaactatttgaacagactccctcccaacttacttgccatctctctgttactgtatttatcttaaagtctagctctatactaacctgaaaaatcttgctttagctatagaaccacaacattctttctaagtttatcaatttagactcctttaacttggaaccagtggtcatccagatacagaatagatgacttatggcagatttgtttaaaaaaaaattaaagcaggtataatgatatctgcaattaacctgtaatttctgtttttgtagttattactggctgccattttttttttttttactaattctaattacaggttgttctcagattttatcagtaacgcttgaccaatttaccataaatgatgattattgagatccagtgtcactttctaatccaatagatcttggatgtagcccagggatatgcatattttatgcgtttcccctaatgagtctgcctctggttttcggaagatcctggtttgagaaaactgtttgagaatttaagttgggtctctcacctaagagactgtttcttttccctaaccttcataaattgcagtcagcagatatatccaataaatcttgtacaatcatggagaaaatttaaggcatacttttagaaatgaggattcttgtttttgtatgtaaactttcatgctgtttatgtcaccattctccctacttctattttttttccatggatattcaggtttattattatttagaatcagaggatagtacaactggaagagacatttataatgatgtaataatgcctcaattacatatgagaaacttgagcctagaaaagatatgacttttacttaaaaagtaatgacttttataatgtcatttacctaaaagttatatataataatactagttttattagtaaagatagatttactggcacttattttagtgctatttttaccagatatttttaggatcttgctattagaactttgttcagtgataaaatttaattttacttttaattatggagcaatacatgcttgttgtaaaagcacgaatatttcaaatattccacaataaagagaaaataagaagtaagtaatgtttcttagttttccaatgttagtgttcagagataaagtatattttccatactttttttttttttgagtcagagtcttgctctgtggcccagactggagggcagtggcatgatctcagctcagtgcaaattcagcctccagggttcaagtgaccctctcatccctcagcctcccaagtacctgggattacaggcctgcaacaccacatcccttttcccaggcagtgttatcactttgtcaagcccatgctcttccatactacagcaggtaataaactccacttttggtgatgaacaggctattctgatggtctttggggagccacattctatatttttatgtcatattactactataatattaaaaaataatcatgtataagccaaataattagtaaaattaaaattttcttgattgtgatcaaatatttcattaggctgtaatggtttcctttttattgtctaagatttcttcatttggtctcatttctgcaatgcaaattattttgtaaccaattgttaattcacaatagtccgcaattaagtagtaagttctttttatcattgttgaaacagttattacaaagaagttgtctgtagatgtcttctaaagtttccaaatcttacttcataagctatcttttttcctctacaccagatatttaattttttcttttatgctatagcttctaggttgttaatttctgaattgcacaaggcacacgaataattgaacttcacatctcctactaaattattctatgttaataacttagtaataacaagtgcaattactttagctattcgtgaacaccttccacagctttcaacaagaggacttatttttaagactttttttaatgctaagcataagaaagattatatgtagggtaattaatgtctaattgagttaggcaaactctaaaatggcctccaataattctcacttcaagacatccacagccttgtgttatatgttctgcctgagtaacttgcctctagccaacagaatacagcaaaattgaggagatgtcacttcttggattaggttacaaaagatggtgttttctgaattgctagtacactttctcaattaccttctcaacttgcatgctttgataaagcaaacttccctatgagagaggccattatggcacagaagtgccagcagcctcaggccaacagccagcagagaatagaggccctcagtccaatagtgtgtggagcaacaaagtgctgcgacattcactgagcaagtttgcaaatggtttcctccccagttaagacctgagtgagaccacagatcctaaaccagcatcttgattacagtttcctgggagacagtgaagcagaggacctagctacagcatagctggattgttgacccatagaaactgtaatgtaagtatgtgttaattgctaaatttgggggtaatttgtcattcattcatcagtgactaatacactcatggatgaattaaaacctttttttgggtttcctctgatgctcctcagcttctgagtgtaaagatagtttaaaaaattaggctttctaatgtcagagtcttcatgatttaatcatttagaagtcatagtaatcggttttatttggaacagatagagctcttaactgattaaacagaaggggaattctttggttttctttttatttgtctcttgatagtccatggaagtgctgaggacaggagagccacgctggagagaaagtttgctaaagcacagaagaggatgctaaggaaacttctccagctttgctgcctgctctgagctccggaagaaactcccatagccagtgcagacgctgatacaagaaggggctcaattttcaaataacaagagccttcgaaaggtggacatatgctttcttttaccaaatcatcccctccaaattgaattatcttgtgaatttatcagactagtaaagccaacgttatatctctgaatcttgagtcctatagaagctgatattttcagtatttctgagtttcatctcttgggatgatgggacttgtgaggataaaaaattatcccaatataaccagaattaaaaaaaataaataaaagcacaaatttaaagaaatgagaacacatgttgctaaacctgtattatgttgtttaatgaatagctactaagggaagaaatgaggtggttgaccaacatctagaaacagggtattatttcaccaactataaacataattcgtataagtacatttccaaatcgttccacatttccagttattattctgagactggaaggaggagaaaaagccctttcattccagactaaaggaaattcccacacctaataatgtacacttggaaagttgttcaaatttgcatttttgaagaagcaaaggaagtcaacaatgtaaatctacatctaaaaaatgtaaatattcatttaaaaaggagaagctcagtaaataaggtaaaacatatatctgaaattcaaacacatatttgaaaaggaagtgaatcacactacttagaagaaaaaggaatctaacacaaaagaactaaaaactgttaaagatgtcgtttaatagtttagcttcaggtgtcataacattctgttaattatggatgggtggtcctccctcattaccggacaggcagaaaacattgctgttgtcaactataaaaactctcatatgatataatatattcataccataatctagttttctagaaaatgttaagtaaggtagctgctctctgtctccaaccctggaatatgtgttcctcttcttgcttcttatatccactttaattgttaaagtaaaactgtgttatattttcctgtttacttctctagaattcgatttaactataaattattttaggacacagaatggttctcatttattctcatttatccttataaccatatttgttaccaaaacctgaagcaaaagttcacaggtgctacacagatttctgtggaaagtaaaaatgtgactcacctgacattttccatacatttgataaactaaaccatgtcaatctatgaaataagaataccagaacttttttaaattataagatctatagaagagaaaaatagtacttaataagtgatatattaaatgcattagattttaagatggtgattaacattatattaaaatggaaatacgaactttggaaatcagttcttaaaatagaactgatctattcaaaggaatagatcagtttttgaaaacatttggtattcataattattcgaccgagtttagcctaaagctgcctcctcacatactttaaattcatcctaaagattttcctgtatacttaagtggaggtgtaaacagactgtaaccttttgtgccaatcaccaaattttggctaactaaggaggaccaattgtttaaaccatgtccaaatgaggtaaaagctgtaaccaatccggctgtttctgtacctcatttatgttttctgtctatactcatttttcctttttctgtctataaatcttcttccaatgcatggctgagctggagtctttctgagcctactctggaacaggaggctgccctattcacaaatcattctttttgcaagaaattcaactctgttaaatttcatgtggctaaaaactttttaacataaaaaaggcatatatttttttctaattgcacaattaagagattttaaaaaatttaagaacatgggttgtctgaaactgacttttccgttgtttattgataaacttacttggaatgttccttgcaattttattatttatttatttatttagagatggagtctcgctctggctctgctgccaggatggagtgcagtggcgcaatctcagctcgctgcaacctccacctcccggattcaagcgattctcctgcctcagcctcccgagtagctgggactacaggtgcctgtcaccacgcccggctaatttttgtattttcagtagagatggggtttcactgtgttagccaggatggtctccatctcttgacctcgtgatctgcccgcctcagcgtcccaaagtgctgggattacaggcgtgagccactgctcccggcctgcaatattatttttacatagacgttatatgctagcattggaattgcaatgcgagtggtaaggagggactagtggaaagaggccaaccatgcctataaccaaaaatctagtaaacttggggtgttcagggaaataaaaaaacaataaccgaggtttaactgcaatggtggaactactgggtatttgtgttataggatagttgggaaggatagaaatatggatatagaacgcacataaggctacctctcccttataaatgtcttcttaaaatgtagaggctcggccgggggcggtggctcacgcctgtaatcctagcactttgggaggccaagacaggcagatcacgaggtcaggagatcaagaccatcctggctaacacggtgaaaccccgtctctactaaaaatacaaaaaattagccaggcgtggtggcgggcgcctgtagtcccagctactcgggaggccgaggcaggagaatggcatgaacccaggaggcggagcttgcagtgagccgagattgtgccactgcactccagcctgggcgacagagcgagactccgtctcaaaaaaaaaaaaaaaaaaaaaaggaaagaaaaagaaaaaaatgcaggctcttctttagctcatttatggtagtcagtctgtaataaatgttgtaaaatactgcttaatatatatcattatgttttaaaattgtcttattttcaaagaaaataaatatttccttttttatttcttcatatatttactgaagaacgttaactgtgagtctaggtcaagtcccaaagataccatcaaacttaccctgagtttattggttactaaagcaaaaactattattacctctgtagagtcttggtagcatatggggaagagaggttatagttatgatacttacaagagttcgggactgttataaggtagatttttaaaattagtatcttaatcagcatttgcaaaagaatgatttacaaatagtgctcaaagtgagttgagttgaacattttgatgtgagattcaaaatacaaccatctatttctctgagaaaagaatgatggccgtgaccgtgcaaggggtcttgtgtttggataaaaggagattcagacagttcttaagcaatgttatttgcaatttcatcttgcaaatgctttttgcaatttatctgtctggattagaaatttcttggaataatagaatcccaccaatgtaggtttttaattagaaatttaacttactgcaacccttgagctttgtagctgtagatggttttagtttgcacatgctatcataatatataactttatggaactaactctctataacaggagaagactggatgtgtgacaaagtcaaggtcacatatagaatgtacaggaacagacaaatatttcttgctggattctacctgtatgtacactttaattataaatctacaatatttattaatgacgtgagtcatagtgatttatcaataaaatttatcaaaataaatacagaagagacactggcatatttgtttattattcaataaagtcctgtaaagatttttccactgtccatattttcctgttttggttaaggaaccacctctttctctctctctctcttttttctctcttttttttttttttttttaagacagagtttcactcttgttgcccaggctggagggcaatggcaccatctcaactcactgcaacctccgcctcccgggttcaagtgattcttctgcctcagcctcccgagtagctgggattacaggcatgcaccaccaaacctggctaattttatatttttggtagagatggggtttctccatgtaggtcaggctagtctcgatctcctaacctcagggggtccgcccacctcggcttcctaaattgctgggattacaagtgtgagccactgcacccggcccctctcttttaaaattaattgtcatatgtgcagttgctggctaatttcatattattcacatttaaaaagggcagcacaaggttgtggcatttcagaatccatattataacaatacagattttgccacgtacattcccttatcatcattgccagttactcattacaccattactcatggggctgcattatccaatatgcaaccgttaaacattggtttctattgattcactgaatatttttttactatgacattaaatcactcaattatataatgagcacagactatgtgctaggtactaaaggtattgaataagtatatcatcaaaaacctttatataattactaaaaatttatattgctttgataaattttactagtggttttactagttaaaccattattctctttaggtctggttaaatctggttaaatctggttaaatctatggatataattcttaacatttatagtttttgaaaccattagctacctaaatgaactttattcagtgaataacaagaagcgtttccttaattattcaatcacttaaatatttaataaacatgggaggttttatcttatccaatgtactacacattcacaaagagaaaaaaaaagatttgtttctgcttttgtctgatttgatataggctagagataagatatatggttaatggatatctccatattttatagatctagaagaaaaattaaatattacaaactctaccttatcattttgtgattgaggtaactaaagaccagaaattttaaatgacttgtgtagaggaagacacagatcttttcagtggaagaacaagagatttaaactcaggttttatgactccaggtctagatctttgtttactgattaatattttgctacaggaaaaagaagacaacaaaaaaagagggaaagtgtgttcaacattagtgtcttatcaaaatgggctattggttgtaatacctagagggaaataaccttccattttaatagcaaatagaaatagaataatttataaaacatggcaacaatcattttagcctctactgaaaggactaagcaatatctagagttgccattcatttattaattgtggagtcaaaagaaatagctaagaaagtaaatattgatgaagaagaaaagaaaacttgaaagcaaattgagaaaataatattagcttaagtcaaatagacggacatataacataacataaggaaattttctttatctgagataagaacactcagtaaattgtatataacagcgatacaacgaagagcagggtagcaagatcagtggctgatggcaaatatagatattgaaagattgattaaaaatcaggaagatgattatggtggcaacataaaaggattctaattgaaatagtaaaatactcagaatgagatatgaaagggtgaagttatcagaaatgcaatgttatagcatagcaatgcaatgttataacataatatatgttataacatagcaatgaaaactcttttcctcattgttctttgttagaatagagtagctgttctgcaaaagttcttaggggttcagatattatttgaaaaggagtcacatatgatagagccgtctgaggaatttggaagatctagagatgatacttccaagatcaagatcttacatgaagtgcaattatttcagcatcatatcagttgcacagtcagagttttaaaataatattgtattacaagactttttaaaaagttttactttaagttctatacagcatgtgcaggtttgttacataggaatgcatgtgccatggtggcttgctgcatctatcaacccatagaagacaattttaatcacattttttggcatacatgtattatggaaatattcaaactaatttgtaaagttacttgaaatatgtgtatttgtatcaccttgtggtagatggctctactccatatataacatgtttctccaagtactagcattgggattgcaatgggattggtaaggagggactagtggaaagagaccaaccacgcctataacccaaaatctagtaaacttggggtgttcaggaaaaaaagcaatcaattagcgaggtttaactgcaatggtggaactactgggtattatagaatcgttgggaagaatagcaaacattagatttattttaaagacattcatggatcatttataatgagattaatagagttggacaagagattaaaaaataccgatgcaaaatgggactgaggtgcagattttgttagtattagcttaaaggtcagtgttaatattgacaaagactctctctttgaccaaattctagacaggttcctctgagtttttctttgactaattctcattcttgggccttgatctcaagagcctagttgtagcatgaacctcgtatagtcagtttagcaagaagcctcaccctcagtatctactcactctcaatatctaatcaaattcctcatctttcgccaccccccaggggtgtctgatcaccccgtcctgtcctcagcaagaatcttgtttatttaaccagaatgtacccttatccctgatgtttctttttagtaatttttcatccactgatcctctctctgttccttggatataaatccctcttattcatgctgtattaggagttgagctcaatttttctcttctgctgcaaaaccctattgcagagtcctttgtataaaatcttcattaccatctgtgacaagtgtcagaatatatttttctttaacaatatcactggaaaattgcctgagggaattaatataaacaagcatgacaaaaatgacctaaaattaataccaagatgtacaacactaggaggtaaagagagaatgtggaattacgtccatgtatcttacaaggcatttaggttctttttttttttctttttttttttagcctagccctcaagagcctgtggtgaaaaagtgtattagaagccaaatagttacaggttaaaatcctgtttttatcttaccagctgctgcttcttgagcaggatttagagtcaattctcagactggagtttcctcatgtaaagtggaaatagtatcgtcccttcctatactaatactaatttaaatgttagggttttattttatgtaagcacttaattaggagctcacaaatacaggttttatgaaatgccttgaaaccacttttcctctgatcttacaacttttaaagacagaatagacgatgtgggtaggatcctaatggcccccatgcatttctaagttatttttgtagaaaatttccaggcgctgaagtggtaaaggcaattgtcatttcttcccttgaatgaggcttagtaaagattttatgattaggaatttggccacctacctcacatctggaaaccatggctatgaaaatagtgggtgacccatttgaagatgtggagtggaactttagatggaataacacactattttcagtcttaaaatagcccattgattcagaccctacatttccttatttaaaaagtacatgaacctttttgaaggcatctctaaatatcctaattttggaaaaaaaaaacctatcattctcatttatatgtagggctgccatataatggaatgtaatactattaaaaggaaaattcagattagaatctcatctcttatggactaaatcttttattccaaaatgaaagtgtggcatttttcaatgaaatgtggtttcttcaatatttagaattcgatatctgcaaaagccaaattaaaaggagcttaattgccagaaaggcaatgtgaagatgacaatggaaaggaataagacacttggcttatttattttttccccactttcaatggctttgttttgtaatgattatctttaggtatcggcatgttcatatttttcttctcaattataaaatctttaatcatttcctcgggtgtataaaaatgaaatgattagatgcaactttaaattatgcagggtaatgatcaggaactgtttactgattctgctatattataatattcaaattatatacaataacatataacaaaattatatataattatattatatatagtttgatatatttagtttgatacaaaaaacttgatacataaatatcaattttatgtcaaattaatatatagatattatatataattacataatttgatataaatatgatatataaatatatacaaatatataagtatcacatttatatcaaattgatatataaactatatatataatttgaatatcataatatggcagaatcggtaaatacttttggccataagactggatacagagattctacccaacactcagttacctaccctatgcacacatattcagctacatttctgttcttttgtacttgcatccaactgccttaagcctcatccttttgattgaattcccaaaaatcaagtactgaaatcagtttataatttatattgaccacagaggggcacacctcaaaaccaatgtaagctgatggaccattttccaaagcataatttatcatcatcatcatcatcagtgctacctttggcccctgtctaaataggccaaggctgtgttaagatggcttattaaatgaaatatgtatctctgcaattggatggtttattactctcttgagaatgatattatctatacttaaaggaaagttgcattttcttacaatttctttctttcagaacattttagttacccatattttagtgtcttttgctcatgtgtgctctttgttataatacatgcatgctccactccaggtagttggtgaaagttttctttcattctttaactaagttctttttcatatctgtgagtaccaaaatatgaaataaaggaatataaagttgagagagaattgatttcctaagtgtctacattaaaaaaagaaatgtagtctagttgacaggatatttgatttctgttagctctatatgttgcatgtagatcaatttacttctgaccttctcataacaagttgttaaaaaaattgtctctatacattgttttaaatatcttttttggttaaagcaaacacattgaaaatccctagatgtgtatttaaggcagtacgacaattatgattcctactaagtttgtttctagacgttttaggcacgtaaaccttcactggagagggcaaatacaaacacctgacaaaaactctctgattggagaaaatcacacagtacctcagccatcaacatcttttctctttgctaaatttaggagagaagacaaatggaaaggatttaaaactttggtaattagctatgactggagcaattcaaagtcaccactttatggtaattctgaattggtttacattacttaaagcaaaatcttctcatatgaatctatcatccaataaatcagagatattaataaacactatttaaaatacaaagcttaattgaaaattagagttatagaagataagtgcttctagctgagggtaatttttactgcctacttggcagaatatattctcaaatccagaggaaatatttctaggagatatttctagaagcatataccaatttccaaaatgaagcaggcccaatggctactttgttttccaactctaagtgacaattaactctatcaaacagaatttgacaaagaatcaaacagatctatgccctcttcccttgcaggagcaaactgaaagaatactctggtttcaaatatatatcctaataaaatgtgtaaattttataaaagactataaagacttcctttcacatgaagaccataaattcttttttatctttttgagtaactgtgaacttcttatcccagaaagtctataatagcaaagcaaaatataagtctttcactccttccattaaaaaagttaaatatttttaataagtgacttattttttaaaatgttaaggttttatgtctatatagtattataatgccttctatagtatggtgcagttaatctaagaaggatatagaacataaaaatatttgcttaaaataaacaaaacatgaaggaataaacaattgaaagagaagcctatctataatggtagaaataagatagagaggactttgattaaaaaaaaaactatgctttttaaaatagtatttgttttgtaagttttatttgttttatttgaattcatgctaatattgcatataattattacacaaaattaaattaaaaatctcaaataacacaatcaaaataaaatgcaataaacataaatttgcacccagttgggcatatccacaagtgaaaattatgccaaatggatttaaaacacagtaatttgactataaatttatagtggaacaaaaataggtataaaaaattttaaacaatcatattacttatggtagtattggtatttttattttgagatggttgtagttttcttttttttttcttttcttttttttttttttttgagaggaagtctcactttgtcatcaggctggagtcccgtggcacaatctcggctcactgcaacctccgcctcccaggttcaagcgattctcctgcctcggcctcctgagtagctgggactaaaggcgcccaccaccatgcccagctaattttttgtatttttagtagagacagggtttcaccatgttggccaggatggtcttgatctcttgacctcgtgatccgcccgcctaggcctcccaaagtgctaggattataggtgttagccaccgcgcccagcctgtagttttctaaggtatacaaattaaacaataaataactgtgtaatctttgaaatcttttgctcccaatgtcctagagaaatgagcttctcagcataggtaaaggagatacaaatttagaaggtaaaatggattgagtataaaccctataatctgcattttaaatgggaagtattatcgtaaactcattttggactttatttggaaatcagcgaagaaaaaataacaacaaaaatttcctaattttttactataaacacctaggaaatatgggctatcccctattaataatacttttaccgagtgccaaggtacagagcataaattacttacttagctatggacaagataatatacaagatgagtttgcagccgctgatatattctataacaaggatgctttcaaagacacagaaatctaatagaagtttccattgacaaaagatggcacatgcttagtttcacaaaaaaatcaatctatcaaatgtaatcatatctgtaatttgattatatttcttaaaaatactttattttttaaagcttgagaaaaaaactattttgaaacctgataaattcaaagaaagaagtatttattctaaatttttccttaggaattataccacttggtgatcaagcagaaattgatgataatttctattttttttttctttttgagatggagtctcactctgtcgcccaggctgaaagattttgcagataaaaaataaagagtaaacatttggattagaatattgactttttgcaattttcaataagataatctgtgcaataatcaccagtagctgctagcaccataacaagatgataaccagctcatatgtttctcctaatacaaaatatgaattttctgattaaaaaaatcaaaacagtgcacatatatactataaaataattgtgtcaaaatatataaaacctgcatctagattcacctttcaatgcatacggaatacaacgaacagagaatacagtttcattattttacatcaatacaatcaacaaaatccagaatgtaagaaatgctatggaaacaaactttttaaaatgagaaaacattgaatctataaattaccttgggcagtatggccattttcatgatattgattcttcctatccatgaccatggaatgttcttccatttgtttgtgtcctcttttatttcgttgagcagtggtttgtagttctccttgaagaggtccttcacatcccttgtaagttggattcgtaggcattttattctctttgaagcaattgtgaatgggagttcactcatgatttggctctctgtctgttattggtgtataagaatgcttgtgatttttgcacattgattttgtatcctgagactttgctgaagttgcttatcagtggaaggagattctgggctgagaccatgtggttttctagatatacagtcatgtcatctgcaaacagggacaatttgacttccttttttcctaattgaataccctttatttctttctcctcactgattgcccttgccaaaacttccaacactatgttgaataggagtggtaagagagggcatccctgtcttgtgccaggtaatttatagattcaatgccatccccatcaagctaccaatgactttcttcacagaattggaaaaaactactttaaagttcatatggaaccaaaaaagagcccgcattgccaagacaatcctaagccaaaagaacaaagctggaggcatcatgctacctaacttcaaactatattacaaggctacagtaatcaaaatagcatggtactggtaccaaaacagagaaatagaccaatggaacagaacagagctctcagaaataataccacacatctacaaccatctgatctttgacaaacctgacaaaaacaaggaatggggaaagaattccctatttaataaatggtgctgggaaaactgactagccatatgtagaaagctgaaactggatcccttccttacaccttacacaaaaattaatgcaagatggattaaagacttaaatgttaaacctaaaaccataaaaaccctagaagaaaacctaggcaataccattcaggacataggcatgggcaaggacttcatgactaaaacaccaaaagcaatggcaacaaaagccaaaattgacaaatgggatctaattaaactaaagagcttctgcacagcaaaagaaactaccatcagagtgaacaggcaacctaaagaatgggagaaaatttttgcaatctactcatctgacaaagggctaatatccagaatctacaaagaactcaaacgaatttacaagaaaaaaacaaacagctccatcaaaaagtgggcgaaggatatgaacaaacacttctcaaaagaagacatttatgcagccaacagacacatgaaaaaatgctcatcatcactggccatcagagaaatgcaaatcaaaaccacaatgagataccatctcacaccagttagaatggcgatcattaaaaagtcaggaaacaacaggtgctggagaggatgtggagaaataggaacacttttacactgttggtgggactgtaaactagttcaaccattgtggaagacagtgtggcgattccttaaggatctagaaatagaaataccatacgacccagccatctcattactgggtatatacccaaaggattataaatcatgctgctataaaggcacatgcacacgtatgtttactgtggcactattcacaatagcaaagacttggaaccaacccaaatgtccatcaatgatagactggattaagaaaatgtggcacatatacaccatggaatactatgcagccataaaaaatgatgagttcgtgtcctttgtagggacatggatgaagctggaaaccatcattctcagcaaactatcgcaagaacgaaaaaccaaacaccacatgttctcactcataggtggggattgaacaatgagaacacttggacacaggaaggggaacatcacacaccggggcctgttgtggggtggggggaggggggagggaaagcatttggagatatacctaatgctaaatgacgagttaatgggtgcagcacaccaacatggcacatgcatacatacgtaacaaaccttcacgttgtgcacatgtaccctagaacttaaagtataataaaataaaataaaatatgtatcaaggaatttatccatttcttctagattttctagtttatttgcatagaggtgtttatagtattctctgatggtagtttgtatttctgtgggatcggtggtgatatcccctttgtcattttttattgagtctatttcaatcttttctcttttcttctttattagtcttgctaacagtctatcaattttgttgatcttttcaaaaaaccagctcctggattcattgattttttgaagggttttttgtgtctctatttccttcagttctgctctgatcttagttatttcttgccttttgctagcttttgaatgtgtttgctcttgcttctctagctctttttgttgtgatgttaggttgtcaattttagatctttcctgctttctcttgtgggcatttagtgctataaatttccctctacacactgctttaaatgtgtcccagagattctggtacgttgtgtctttgttctcattggtttcaaagaacatctttatttttgccttcatttcgttatgtacccagtagtcattcaggagcaggttgttcagtttccatgtagttgagcagttttgagtgagtttcttaatcctgagttctaatttgtttgcactgtggtctgagagacagtttgttataatttctgttcttttatatttgctgaggagtgctttacttccaactatgtggtcaattttggaagtcagtgtggcaattcctcaggtatctgaaactagaaataccatttgacgcagccatcccattactggatatatacccaaaggattataaatcatgctgctataaagacacatgcacacatatgtttattgcagcactattcacaatagtagacttggaaccaacccaaatgtccaacaatgatagactggattaagaaaatgtggcacatatacaccatggaatactatgcagccataaaaaattatgagttcgtgtcctttgtagggacatggatgaagctggaaaccatcattctcagcaaactattgcaaggacaaaaaaccaaacaccgcatgttctcactcataggtgggaactgaacaatgagaatacatggacacaggaaggggaacatcacacaccggggactgttgtggggtagggggaggggggagggatagcattaggagatatacctaatgctaaatgacaagttaatgggtgcagcacacaaacatggcacatgtatacatatgtaacaaatctacacattgtgcacatgtaccctaaaacttaaagtataataataataaaataaaaaaagaaaaaataaacaaaataaaataaaataagaaaacaaaaacaatttattcaacaaataagtggaaaggagagaaagggtcagaaggcaggaaggaagagagaggagggagagagaaaaaacaaaaaaataatctttggagtaaaaaaaaccttaaaaaatcatcaatttaaatgtcttccaaagtatggttaaaaatgtgtgacaattttgacacaattggaagtgtgaacattgacattgaatattaaagtatttgcagatattttaggtatactactaatgacagtatgctttcaaaaaggcttgccttttggagattcatacttaactatctgtgaatgaaatgctgtgatgtctggaatatattttctaataaaaatagagggaagaagtgggtggagatatagattaaacgtgaattgacataaaatataggtaccatcataagctggtaactgtgaaatttgagtaatgaacaaaaggaatccattatatctttgagtctatttttgaattttttagaaattttccattataaaagttaaaaacaatgttaacatttagagaaagtgataacattgtgtgcttattttatcttgaagcaacatttaatgcactagtctggaaagagcaacttaaaaagccgcaaagtcagctaagaactacatcgtctaaaatggtatccactacccacgtgtatctgctacccacgtttatccactacccacatttctcttcaagtgaaaagtgtgtaattcaaattgaaatgtaatgtgatataaacacacaatgcatttctttcgtaaatattatttttaattgataaattataattgtaatcatttatggaataaaatgttattattttgatgtatgaatacaatgtggaatgattaaataaagttaattaatatatatcatctcacccatcattttttatggtgagaaatttgaaattgctctcttagttactttgaaatatacacaatgaatttcatatataatataaaaatgtaaaatgcctcatttataattttctattgattatatttgacataacattttgaacatatcagtttatgtaacatagcttactatgtaaattcccccactcattttactttcttaatatggctactagaaaattaaaaattaatttttaattaatttgcatgatatttttattggtcagtgctgttctaggtaatataagaaagcaggttaaaagatactataatattagggaccttttgaaggttttctctaaggcagacatatagttgactttaaatatacagatgattatatgtgcttaggacatttaagccatcaagaacaacaagactgaataacattacttattcagatagcaggataaaaaccatagaaatgaaaaaaatgaataaacacaaaaacctgaactagaataattatcataatagctaatttcttaaatattgtcaattaagcatagaatgataaaaatattttgttatacattatttatggaatgattgataggagggcatattcacaattttaataaagttatatgttttagcaaatcactatgataattataatatcccaatgcttcagatgtttaaatttcagtattcaatattccaaaaaataagccactttatgcttaatattttttataaatatcatctgactgtagcactgcatcatttaagatggagtttggggggttagtttatcagtaaattttattctcgtaaaagtttaaacgctaatttggaaaagaaataaaacaacacttacaggttcagatagaaaggatgccttgctcatattaatttattttactattcaaagaaaggaacatttagaaaccatctttactgataattaatttactaaaataactttccagaattgaccaaaacttactccttggatttaatcatgtatcattgcatatatgtaccaatatttaaaaaataattctgactcctttcaaaaacgatacagttcattctactttccgtcactctttctccccctctacttatctgtgcacaaaagtcacagtggacgtgctcttgactgaatctgaatccgaactctatttatctgctctacgtatgttccctgaccctgtgggcccaagttctgactagctgcaaagcattgggataatagtatctactctgattttttagaaatatgtgactacgagagacagaatgctttgtcaaatgtgacatccaaatccatacaaaactgaggtcttcaatgctactgtgtaaccaatgtttagactttaagaccttgactttttccaaaatgtcagaagctttacttctgaatgtgacacttcatcaggaggcaaaggtctctgataaaaagtcctggcatgtagcaattctgccagtataagaactgcgcccacagaacaatgtggagataatcttgtgtgaagaatggaagggagcaagcagaatcttcaagcagctgttttgacgcaggtgattggggagttattttaagcagaaagaggaaagttctttggggattcacagtgacagcctcagtcagccctgctctgtgtctggattatgggatggaggataattgcaagtgtcagtcgagactggtattcaacagccggggtctgaaattttctacttgagcaatttcccaaacctatgagataagagtgtactattcatgtcaaagctcaggtatacacaacagacaatgatccaaagtcttaatggataaacactgccttgtgtggtgttcactttgaaaatgaaaatcatcaacatcagaatgtatgcccatctacttgtctaaaagcttacaaagctgatttattaacacagaaaggaatcaaatgtcaggcgtctctgggtttaccacaacatagtatggacctcttgttttccatctgtggatgtaagtcttcacaggttagagaatcaagagaaatattaaaatcacgcagtaatgatggataggggtccttgacttatttaaaaaaaaaaaatcacacaattccagaaaactggctagagctttgtaaaagaaaaaagaatgtaaatgtgaacttatctaattctcatgtaaataatagtaaacttgaatatctatagggactgtgttataaaacagagggggataaactctactggctaagctacctcagaaaataaattgccttccttctatttcattctttcttggacatgactgccctactacacagaatgattgaactagataatcgtgtgtaggctgcatgaccaaatagagaaggtggggttgcattttcattgtccaaggagtagcctattgttctgcatacttctttgcatggctatgttaaaaattttccatcaagtaattatttctacgcattactgaagaacacagggaatatatttgaagccaattcaatttttaattcatttacaaaggaattcaaaataaattactcttccgagattcttgcattttcttaggaaaatctcttttcaaagaagaaataaaactagaaagaacatttcaagttcatttatatcagcttctcacatccttcccctttggcaccatcagtgtaaatgcatctcattctatttcagttttcattggcatggaaaaggactagcagttcttttctggcagccagcaaaacagaaaacacagcaaatcagttattaaaatttaaagcactcttttttttcttggcaattgtaactgtgactcacagttcaggagagtggtgaaaatgtaagtgtgatttaacatcataaagtttctcgcttaagaccaacaatttcacaaactcaagatgcctttaaaaaaataaatctagaggaagttcatttcctgttctaaataatttttctaatctctgataaaaccttcaagtgtaatcctaaaaaacaaaatacagctctcgtttcttatttaaaaaaagaagagagaaaagaaacaacatcacagaaataactttacttagagggaaactgttgtaaagtacagcctgcctgctatttcaagatccaatacaatttcccaggttttatattataagcatccacttgaagaggaacaaagagaaacttcagtgccaaatcagcccgttgaaaaacacatatcctctcaagaatgatgatctataattaatgccaatcatttgagaaagattaaaaatgacatacagcaacccaaaggaacagtgtagtgatttccacccactattttgatggagagaaactgtgattacattcaatgcaagagcaagtttgggggtaatgaggatgatgaggatggtgactcagagcactccagaacacagtttgagtaaagatgatataaaataataaaagccaatgagatactcaatttaggttaaaataacaactgaaataattatttgttataatcttctgctctctcgactgattttcattttattgtacttgccttggctaaaccttaacgttagattaaacccaactaattttcttcgtgctcagggcccatacttagctaatgactatagctggatggctttataaatggagagtttaccaaaataaacacctttttagacattcaacgtgttttatttatcttacggtattcctcttgttaacctgctctagcaccctgcaaaataacatattcaatgttattctaattatttatagttgcatagcaaactattcacaaaacttagtggtttaatcaataatttatcatatatatgtctcatagttctatggattgcctttgttcagctgagtagttatatcttttccttgcatatggatagtgtctggggatagagtcatctgaattcttaattgaattgcttaattgcagccacatgagttggctccaatgtggctttcttactcacacattcggtattttgttgctcctttctttagctctctatgtatggcatctgatctctgggatcacttgtcatagctttggcttctcataacatgatggactcaggacaaccacacttctaatatggtcctgtcttccaagaaggagaatcaaagctgaatttcccattataggatatatgtgggattggcagcgtcaatttgcctgtgttttattggcaaaagcagtcactgtaactagtgagattcaggaaggctgaaaaatcgacttcagttcttaattggaaagtggtaaagccacagtgctgaagagcatgtgagatgggaaatactgtctcatctctctttgaaaaattcacctactatccattctctagtatttcaaatttctcaatgtcatccctactttcctcctcacctatacaccattacccttataaatgctgtcacttcttactttacagtgaatattgaagtcatcaggcggatgccaactcaaatttccactgccaattctataaggctttcggcatctgtactcacctctttctttttctctcccatcattaatggaggaagatctgcttctagtaaagactcacctctccgtatcttctataaaggtcatccctatattcctttctgcaccttatcatgttgcttaactgtttttctccaagatccttgacttccaaatttctactatttaattatatgttcacaaaacatggctcaattttctcccatcattaaaacaaacaggctgacatgcaccaaaatacagcggaagcttcttggtcttcaatgtacgcattcaatatccatgaggacataatcttacttgtttcctgtgttttaccacagaaatttttgaaagagttgtcaccattcactttctccatatattctaaaggagcttgtgtcagggtcaaaaataaagtatccggtttctaaatctaaagcctactctttagtctttatcatattagatatcacaagctgcctttgacagaatagaccgtttattgtggcttaaaatacactgaagtattgctgtttctgactcaatatcttacaatggtttttagaaagatatctctttctgaatttagttgaattttccccaaggcctagagaagactcagcaggcagaattgatgaccttttcgtccaatgtaaagggctcagttaggtcaggttcattgtgtctggtttccttatcctttaagatgatttcgctcccaggaatttcctcagtctcttagcagaatttttgtggttcatcccacctagtgcattggagagctccgcatcatagtttaggctaagcttgtactaggaatgtactgggtgaattaaaatatatatatatttcattcatgaaaacattggacagtggactcaacatagtcaagttaataaatactaataaaatttcatttccttaaaaatgtaaaatggtcactttttaacaaaaatatttggccaaataaaggacgagaaaagataaaattaagtgtcttaaggctttaattggaaataaaaattaaaaatgcatcaataacctgatcattttttcatgaattgtttaaaatttagctatggaaataaattcatgagtctttaaaaaattctataattatgtttataatggggaaaaacctcaaaagtgtattaaattatctttttcttgtataattaaacaactgtggcatgctaaattgctcagacctcaatcaactctttgatttaatgcttcactgcaattctagcaggtggaaatagaaatcaaaaataaaatttggtacattttgtgctctgaaataaactgtaattatatgttcttttataaaatttagtaaataagaaggaaaaaaccagaagctccgttggccagctattcagaaatatcagaaaaagcaaaaatctagaatcctgattaggattcagaattctcaataaattaagctctttgttcaatgatgttagaagtataagaaggtttatgggaccccagttggcagaagatgctaacatttggctcattattacttatattcaagaagcagtggtgatatataaacactctaaaatatttgctttttttgtaacaccatatctctaaggtactgcacatgtaaatcattaacatgtaaagaataaaaaaagataacgtttaattctgtatttgcattatcattaattagtaaatttagatcaatattgtgtgaaccatacattttctattctctattatgggatattcatgtaattatgtgtgaatgaatatagacacaggacctgtagaaaatcaataactaggataaaaatcacattaagaactagaatattgagaattttgagaaactgagaaaattgagaagttatgtgaaatggaaatttagaaaatgaagcagacaatgttgcaaaatattactttatgtacctgtttttctgttttacataacttacagctactttctttgggaatataatcataataaatgtctataaaatttaaggcatatatcagattataccgcaagtactatgagtttctatatggttttgaaaatcctaaaggttttcaaacagtgtaaagacattaaagactttttactaatattattttaactatacgtgtatatatagtatagtatacttatatagtatattacgctatactttatatacacacatacactatagagtatagtatatagtatatactatactttattatatgtaaagtatatatactgtatactcatagtatatactatatactctatatacatagtgcatatactatactctctatgctatgcatagtatacagtatatactatattctatgtactctatatatagtgtatatactagactatgctatgcatagtatataatatagttgatataatctatatacataatatatatactaaattctgtatactgtatatacataatatatatactatactatatactcatagtatatgagaatatatactatatactcatagtatatattatactctacatagtatatattattctataaagtatatgctatctaatcacacagaactgcaccgtttccaaacaggaaactttaacatttttgtgtctttttattctatctcatcctacccctttatcatactctgtatagtacatactctgtattgtatatactatctatatatggtatatactttacagtatatactgtagactatatatgattcattatattatatactatatactatactctatactcctactatatactatactctgtattcatactatatactatattatatatactatactctatatagatattatatgctatacatcataatagtgtatatttcatcaattatttagttgcagttgtataaaaatgttacaacaaatgctagagtccttccctttctttctcagtttacagaggcattggttacctagtattcaccaaatgagtataaggagtttttatcaagttaaaaaaaattatcatttttcatcagtaattaatttccaccaacttttcagtaacgtgaagtgatgaagtatacactactatggtatactatagtgtacagtatactatataccatttactcccatcattaatggggttatatactatatactataatatatagtatagtacattatactatatgtatactacactataatacgtatacacacatactatacaaattatctatatactatatagtatcatatactatactgtatatacacacatatagtatatagtatagtatgctataatatacagtacagtattatatatacataaatagttatagtgtatagtgagtatagtataccatagtatgtatcacacatagttaaaatattagaaaaaatttttaatatacacatatatgtatacacacacatatatacacacatatttatatatataggtacacatataatgttatttagtttttatttatatctaaatttgtgctatggctagccctcatgtcacatttttgtgagaaaagactttaagaatcagttctatggtgaactgtttgaactctctgttaacttttctaataatacagaacaaaaaatatagagatcataaaaatcagctgggaaagaactgacttggaaagagaataaagacataggcaacataaaacataaccaacctaatccatatttaagctttttttcagctagttatgcatcagatagaaaagcataggctgtaatgtgtttgttacaaatgattttttaaagagtattagtcagacatattattcaaattcaaatagcttgtaaaatccataatattaagtctttaagtgaagaaagacaaacttgataagttaatatagtttttgtgtctgatagttaagtctaaaagtaaaggctctacaattgaaacattctgggtctaaatctcagtttgtattactttgtgatggtggacaatttgctgagcctttttttctgagtcttagatatttttatctgtacaagaggcttagcaatagcaccaacttcacgaaattgttaggaatatgacatggtaaatggaaataaagcagttattctaatgtctgacagaagaaagagcccaaataaattgttaacatagctttaatcaattagctacctcatgtattccaaaattatatgattcaaatttacattcacagagtaattacttcgcttgcctctcttcacctttggttagttactatctttatgtttatttcttccattttcttgatcctttttctctctattgtccttcttacacccacaggcaaggctacgacacgattactattgactaaattatgcccgtgcccaaattcagatgttgaagtcctaacccctagcccccctcagaaggtgactgtaattggagataggaccttaatgaggtatgtaatgttagaagaggtaatctgagtgagccctaatccaatatgacctgtgatttttttaagaagaggcagaaccactacagatgcttgttcacagagaggtcatgtgagaacacagcgagaaggcaggacaaggagagaggcttcaggaaaaaataaccctgatgacaccttgatctcggacttccactcttaatgacacagaacggcatcacttgcaaactgaaaactttaacgtttttgtgtctatttattctatctcatccttcccctttatcatctgatcatgtttagtgcatctgatattttccttcatctgctcatgtattcttcagaaattttccatgtattagtttttcattctacttttagtcttaatttttttttttgttatcctgtctacattgaaccatgtcagttgtcctatccagagcactcttgattttcctctgacctttaatgagatcaaacataaaacttgctatgtttggatgagcctttcttcacttaccaccgcatcactgctaacgttgcaaaggaaaattgtaaatatagatgattgtctacttaaaattcctgtcactcagaattaggtaatttctcattgttaacttttactcatttaaattattttacttaatacataatctaatatgtccttttccacttttattaagctcccaaataagagttgagtttgtcttttctttccttccttccttccttccttccttccttccttccttccttcctcccttccttcctctcttttttcgacaatgttttgcttggtaaccggggctagagtgcagtggcatgatcgtacctcactacagcctcaacctgctgagctcaaatggtcctcccatcttagcctccagagtagctgggaacacaggcaccaccaaaaccagcaaatttttgcatttttgtagagatggggttttgccatgttgcccaggctgggctcaaactcctgagctcaagtgatctgcctgccttggcttcccaaagtactgggattacaagtgtaactacagcacctggctaagtttgtcttctgaatagcttcctcaacacattgcataagacaacagcttgtctatttaaacttacataagtacacacatgcacacatacatataacagttgtgaattttgtcacagagcttacagaatttctataaactttatgttctacccaccatatttattttggtttctcaagattatattttattatcttccacccttcccaatttctctttatgtcacctttatagagtgattgccctattggaatgtatccctgggtttaaatcttaacttttctataaagtcatttatcttattgttcctttgacaccacacacaacagccaagaacatgtccttccccactcgtgtatccaggccagatacatgaagcaacacaatctggttctctgggcccagtggaaaaggctaagtcttctttctattggggagatcagttacttggcttccttatttcaccctgttactttcaaaagctgacctgggttcctaattaattgaaaaaatgtaaaacttatttttactatgtactttcagaactttctttatgcatgaaacttccctttatgttcatccaccttctctttattctgttctatctttgagtgagacgttgactatcatttcaccagagccaattccgccatttgtatcctctgttcaatctattctatctctagggattttgttccattatttccttattctgccatgcttctcaaatctttctccatggaacccttttaactacaaaaattcttatgattttctaagcttcaaacccattttctcttgctaccactctaatataatatcttctctatttcattataattgacatcaaatttctctgtctctcctttagctctgctagtctttcatctcattactcttttaacattacaacaatgacttcacaatggcaactttcatagcatttccagaaacctcttccttctcaactactcagtaccattttataaaaggctccacttttctaggtctataatctcttatacaggattgaaaaaattgcagaatgctaatgagagtcacgttctaaaaattactttctgggaaataagtaagctaaggaaagagagaattgaagcccacatgctttaagaaaggatgaagattcagagttcaaaatgatgatgattgtaggagcgtgtatgtctcatatgaatcatttgatactaggtgatgatttcatagaaatcattaaaagatagctagggcttaagaatataagaacaacaacaaaaaaagaaagctgttttactgataactctgtaaaacactgaagcacaaatcagaatacattggttctgcagtagcaaaggaacaaagagtgactggcaatcttcgtgtttcacaaactattagaacatgtgttcattcttcatagaacttataacataattaatgtatgagagtccattattttgtaatgtaaagtatgagagtgtctacacacatttttggttttttttctggggactattattaaaataaaaaatactttcatctttagatgcagcattgacacctaagaatctatacaaaagaaataaaagtgaagtcatgtaaaggtatatgtacaaggatgttaatttcagcatttttttaagtagcaaaaattagaaacagagatcttgtcatcagttttaaaaaatagacaaagcatggtgtatacaccaggaaaatacatgccataaaaattacacagccattaaaaatattaatttccattattccagtttaactagaagagttctctaagtcgtttttttgttttgttttgttttgttttgttttgttttgttttgttttgttttgtttgagatggagtctccctctgtcgcccaggctggagtgcagtggcgcgatctcggctcactgcaagctccgcctcccggattcacgccattctcctgactcagcctcctaaataactgggactacaggtggccgtcaccttgccctggttaattttgtttttatatttttagtagagacggggtttcaccgtgttagccaggatggtcccgatctcctgacctcgtgatctgcccgcctcggtctcccaaggggctgggattacaggcgtgagccaccgcgcccggcccctctaagtcatttttaagttaaaaaagtaaggtatatcaaaagttgtgtatcattttaaaaatttttttaaaaggaaggatgcttactatgtgcgatggttaattttgcatgtcagcttgactgagtcacagggttcccagacatttggccaaaatttattgtgagtatttctgtgaggatgtttctggatgaaaatagcatttgaattgataggctgagaaaaacagcttgccctccctaatgtggttggacctcatctagtctgttgacggcctcaatggaacaaaaatgctgaccatcccatcagcagaaaggaactgcacagactgccttgagctgggatcttggttctttcctgcctttagacttgaactgaaattctggctttttctgggtcttgagcctgccagcactggaacattaactacgccacgggctcttctgggtctccagtttgccaacttctctttgtgggccttgtctgtctttgtatatgtacatcttattggttctgtttctgtggagaaccctgaccaatacaaagttgatgtaatcacccaaggcattgaattcacacaaattagagattttaaccaaaattaagtctctataattccaagtatgtaagttatcacaaggaacagggaagcctcaggaaaaggaacacagctctccaggtgcttccttatgatgttgagtatattttatggccaaaattaaaatatgtgtcttccatgtaataactgtggccacataaattaaacacacacacacacacacatgctaaatatttcagtcaaggaacatctccattttgctcagatggtaacaaagcttacatgacattttcccagaagccatgcctagtcaatgtcaccaacttgtttgacaggaagtgtgccattaccatgcttacaagcagcatagatcaggttgaccatctgtcttctttcctgtagaggtgaatgccctcccatcattgaggacaggtggctgagctgctgctttcatcatttatttccaagtactgatatgcatgatcccataggtagctgaagtaggggcaagcaaaataaataagtaaataaataataaagctttatgaaaaagaaaaacaggttataggataaagcttcatttgtgcaaaatatttatataatgaactatatgtgcatttttatattttaaaaatgcatactatagatgcatttttaaatgtttcacccattacacttgttacagagctttgcatattataggtattctgtatgtatgtatggaaagagtgcttaaatctactgttaaaataatacatgaaacaatcaaaaaccgtatgtcatatataataatataacattatttcaaaattaaatgttgccccaaaaccccatgaaagtaattcttttggacaaattttgctggaataggttagactgagtagaaaacatttcacaaaaatattacggggttcttatttacccatgaacattgatggagggctgaaagagaacaaaaaatatcaatgcccatttcataaattgctggagaaatttgctatgaatattgaaatcatgagttttattattcttctacttctcctaatgcacatgcatatcccatctttggctcacattgtgaatattcactattctcaactgatttttctcaaagagtaaaaatctaaaggtgatatttttggttaagggtgttatgagaaaatcgaaatacttcttatatgatcagataaaataagaggaaatcatgcaaatataaagtttaataacatttagtaaagcaatgttcctctaaagtttaactctaaagcttagagtgtaggaaggaaaaataattttcaaaatttgcaagaaaaatgggtgcaacaatatggaagtttgtctctttcttcccccttctcctcctcctccttctctttctcttatttttctcctgcttattatgctgttcctcctctgtcccctagcattcttgattatctactgttatgcgaaaaatatcctatcagatttgatgaataaataacagtaacatctctaatttatgtattttttacactgtaagaaaattggctggcagatttttattttagatatcttatttttgagcatctataatatggcacacaatgaatgtgcctaattaagtgaaccaaaatgttattaagaagatgtagtgagtttttaatgacactatttcatgaaatatacttcctgtacactacatctcattgaaatgtaagaaaattgttcagtgagtatatcattctacctagaactttttttttttgagctggatttaatgtggttaggaatttattgcttgtaaaacatatttgtaattcctggaattagttcattaatgtaacaggtaattctcaaaaacagaaaacaatttgaatatatattaggaaatattatggaggaaactgtattttaaaaccagagagtagaaaatttaagagtgaattagatagaatatattgttctctcacagtatgtttttatattatcaattttattccattcataccattctctgttcatagactgcagtgtcctctgtctgcttcacaccctacaggacatacaaacatacttcttttttttttttttttttttttttttgagacagagtctccgtctgttgcgcgggctggagtgcagtggtacaatctcggctcactgcaacctccgcctcccaggttcaagcaattctgttgcctcagcctccccagtagctaggattacaggcacctgccaccgctcccagctaatttttgtatttttagtggagacagggtttcaccatgttggccgggatggtcccgatctcttgacctcgtgatccgtctgcctcggcctctcaaagtgctgggattacaggtgtgagccaccgctcccaggcatacacttttgcattaacattctacttatctacagcattaagaaatgtcagagaggattcttccctgaagtatgtaccttttattacatcattactttttataaacagcattttaagattattcaatcattggtatgcattcccatcacatttatttctagttgttttgttgcaaattagtattgcactaatatgctttcaatatcccataaagtttctgcagggatctcttatgtacagtagtccctccttatttgcagtttcattttctgcagatttagttacctgcaatcaagtccaaaagtattaaatggaaaattctggaaataagcaattcatagttttaaatttcatgtggttctgagtagtgggatgaaatctcacaccatctatttggttctcctccatcacaagaagaagagtgagtatagtacagtaagatatgttgagagagagagagatcatattcatgatctcttttattacagaatgttgttataattgttctattttattattagttcttacagttaatctcttcatgtgcctaatttatgaattaaattttatcataagtatgttagtatagaaaaaaatataatacagtttatatagggttcaggactatctgaggtaacaggcatctcctggaggtcttggaatgcatccaccaaagataatgggggactactgtaatagccgtattaccttttttacaagtgttttcttacagaggttgaaaatttttttcaatggcattaaaatgtagtatttaatctgcttgaatttcacagatttttttcagattttgagtaactcatatttctatcgtattagaacattaatatacgagatgatccccgtttttagttcttcacacactcccacccaatctggcataattattcacagcttcttttatcttaggaagagaaagcacaacctagtttcatgcattcctcattttctccatagaatatttcataatacttgttgaaaaaacatcatgtactctaaatttcacctaaggattcaaaattatttggccttacttaaaagatatttaagtatgcattaaagaaaaataactgccgtgttataataatactttctgtgttatttttgaagcttgggaaatacacctttctgaaaattgaattatttaataattttcttctattaaatttttaaaaagtaactgataaaatgcagctgggtgagtttttttattaaaagccttacaaacgattgttcagatgttagtgatagttaaaactgaatcaactttcaaatcaacagaaaaattaccttaatagattatatacataaaaatataaactgtttcataagccacctgtcaatcaatgatcacagaaatgttactcaccaaaacaaccaaaatattggatacttccaaaggcattggtagttcagtgatagaattcttgcctaaatattggaaacagttttattatctgtttttataatattttagtctgttatttttcaacattaagaaatataaaactgaagaaagattgcgtatcaacacaaaagtcagcatgtcttttacatgaaaactttttttaaaaaataaacattttgtttcaggcttacatatgcaggtttgctatatgggtaaatgacctgtggcaagggttttggtgtacagttaataagcatggtacctgactggtagttttttggtcctcagcctcctcccacccgtcacccttaagttataatttctgaaaattctttaggtttgcaaatcattgatgtaggaaaaatattctccaaaaattccctgattccataaatcattgttcttgaagccaaaaaaagtaaactgatcaaaccacagttttatatgattggaaaaatgttcacttgaacattgacaaaataaagattacctaagagattatatacttttaaaactaaaaatatcactttaacctttctcttattatttatttacacaacgttatgaatcaagattcagagaattagtattagaaatccatcctcaggatgtgcacgccagaactggtgaatctgggctctattaaaacatattacattattcaagatgaacagtcatgaaacacatgaatcataaacttaaattttttaaaagttagaaaagaaaaaaataataaagtacacattttgcctatttctaatgtctttcctttatagttgtaaagggatataaactgtatgttagttcatacatagcctatacgaacaaataaaatacttccaaaaatacattgcatagcttagtgtctcctgtggctataataattctttattttgaaaagaaaaaaacttttaacctctataatggagtttaatggttcaatgattgaaccgctgaaagaggctgctgaacttgaagctattatacttggtatttctgtgctttgtttagtgatgctgggactgcatctcagcaagacacatctctttttgttttactcacctttcaatagattctgttaataagaagacccacaaggagattggaaggcaggaaggtagagaaaggactgaatctgtttcatttgtaagctgttcccaacagcttctccccagaaattaacgtaaaaaccggcagtagcttctttcagctcacccaaggctagtctcatgcattctcccgcgaggggtgcccgcaagagcctggtaacatcctgtcctgaaggtcttagccccatttcatgggatcccttctccaattttctaggtttccagaaccccaacttcctcctgttgctcctctagcctgacatctttctttgttacctgaatgattctcttttgctttgttagctttccagcacccatataacaaattacactaacttacttctgtgaaaatacctcatctggtttctgttttcttgactacatctttaccaaacaaactattcttcctttcctccttattacacattttctcctttcctctctgtcttcctgccctccagtgaggcgttaggatccttcccaacacatacttgcactcaagtcattattccaaacattgctcctaggaacacaaactaagaaatatcgtaaaaatattcatgcagactggttcaagttttgctgctttcaagatacaaaggtagtgcctggatattttgcagcagcagctattttgattttgatattatgggacatctgaagggtagtcaaaattttgtttaacacatacttgactgagttttaatcaggtgtctggcactgctcaaagtgtagaaggaacataggtaaaagacaatctgttttcaaaagcctaagaaggaaaagaggatggactatatatatatatatataaaatttttgttttgttgtgttttgttttgttttgttttgttttgtttgagacagagtctcgctccatcgcccaggctgaagtgtgatctcggctcactgcaagctctgcctcctgggttcatgccattctcctgcctcaacctcccgaatagctgggactacaagcgcctgccaccaggcccagctaattttttgtattttttagtagagacggggtttcaccgtgttagccaggatggtctccatctcctgacctcgtgatccaccgcctcggcctcccaaaatgctgggattacaggcgtgagccactgcgccaggctaggatggactattttttagcagaaattctgggaatcatggcagtgtgagaaaatcgtgttgtaaattaattattatttaagtgattattaacataggtggaaataattcaaataaaacatttctacttatagctaatatgtttcagaacacaatgacgctgaggttcaggggaatgatacgctcatagttgtaaatactgcttattcacactattgagggctacaataatatttaattaatttaatgtaattttaagtaaatgtcgattaaaatgtaaattttcgtttttaatgttattgtagcctcaatagtgtggatttttatgatgctagttaattttttagattagaaaacgggattgaattcttagaatatttgtttaatgatatatttttatttgagacatacttaagtctagatccaggttttctcacttcaaatacattttctctcaaacataattattatcttaaggaagatgtcttactgaggctcgtttctatcacattatgcggttgacagctctccatgggtccttcagatgaccacatacaacagcatatgacagacacacttccggccaccagcttaacttttattatatccttaggttgttcatgcctatttctgaatagcttgccttactgcccttttggaatctctaaaacacagacactttgccctcacttgttccatcttctactactttctggccctttgatattgtaagcacttcgaatcatgttacaaactttcattttcttaaatttcacttcaaatttccattgcgttttcacagcctcaggttactttagattttttcctcttttgtcctgatttgaaaaatccacaggagtcccttcatctggttttttcattcttgtgtactatagattctcctccttcctggtttaccctgatcttttggacaaaactcagatgtaatattttacttatttgagaaataaaaagcttgaaatgttatttccagtcattctcaatgcaacatattgctcttatatgtttggatttaatacatttaaatgtatttatctctagcgattttttacctataacataaacactaattttagcaataaaccactaattctgagtcaagttattactgataataatactttaaaacattcaattagttttgaaaagtatatatcaatatcattgaaataaacttcatctaacttttcgagggtataatcgttggcaggtagaatttattttttagctttgtagtgaaagtacacatttatatactacaatgtcatcatcttttttggagataaggattgcagcgtttttagaaatacagcacatggactaattgttggcagcattccttcttggactaatatcttactctcatcagagcaagattgagaaagcttaggtcatcctttatttcccaaaggtcactatttccaactgtggatgcatttttaagactaacacgactaagaaagaatttcacaggcatggcacacttccataagtgttctttctacactcccacaaaaattatttctctatccacttagtagaatgtgacccatcgatgacttttataatgttgttgtcctcttctgtgtgcatactatgcgagagttggctgtacctctaatttttgttttcatcccagaattattttccaaagtaccctaataagtttatcatctgaatatttaaaataatacacttaaatttttctttcatccatacatttgtttatccaacagatatttattcaactcctaccatttaccatgcattgcaaatatttgtaagttggttgttaggcacttttttgtctttttatgggaaactatggaatagtaattgagtaagaagatggaaaataagaagggagaaaaattagaaatgaattagtctaatcctttctatatttgttgttgttgttgtaacattgtattactaaagcccatgttaagtaacttgttcaaagtcactgtagggatttaccagaaaaatagcaaaggggactccacatctcctaattcttcatccaatgtattttccaacaatccagcactttctaaactcatagttggattaagtcaatatcaataccattattttaaaaattcattcattcatacaacaaatatttagtgaatgcctactgtgtgacaacaactgatttgttaacatggcatacagacaaaataacattatcattgcaactattaaatacatgaattatagtgtgtgccaaatggttttatgtaccatggaaaaagaaaggcaacagattaagggggattggcatgcagggaatgagtttggggactactgaaatttgaaaaatgtagtccatgaatttcatctaagaggtatcatttcagtgaagaattaaaggagataaaaagttgagtaagtggacattcgggggaacaacaactcagtacaggaaaaaggcagtgcaaagtcttcgaagtgtgccagaggaacagacacacggaagccaatgtagctggagctgaaagagtgagtcatggaagacaaggttgaagaaggagtgggtaacccggaagcctttgggtcatcggaagggatttgtgttttacctggatagaactgagaactacctcaaggttttaagccaaggattgacatgacttacatcaccttatttactgacaagacattctaaaggcacaacggtgaaagaaggtcaacccatctggtggtctgtccagtaaaccaagctcacttcagggcagtcagattaggttgctacatcttatggggagtacggaggcaagaaaatagtttctttcagcaaaattatagcataagaactcatttctgtcactacaaaggcaaagaccctagtggcatcccaggtttcaaatatgaaaaatgagactttccaaaaagcgaaatagtgagcaaaatgacatccaggtagatgtgactttcaggggggacagtactagatataggtctaaggtcagaatggttcttcgtagctctggtcttgcaacaaattgctcagaaaggggagctatatgaaaaacttcagactccttttatttacttacttaagaatactgtccctaaattcatacacacacacacacatatacatatatatatatgtctttctgaagcccatgaacccagatgtattttagaatgtagaaatttggaaatactttcagaagcaatatgcgtatctactgtgtattacatacaaattctagtgaagtctgcaatcaagcacagctttatgttcacagcaaatcctatgaatattcacactaagtgggtaagaaaaactataaataatctcaaatctatttattcgctaagggaatacagagcaggtcaaattttactgcccatcgaggaataaaaacattcaattttttagagggttttggattttgtaatcacacgtaagtgattaagcccttgtattttataagatattttatctcagttgctgcaaatgtatagtcactttaacctagcactagcttaattaaagaatacaaatgtacattgtaggttaagccttaagttcatgctcaatgttatgcacggtcttgacatctggtgaatgcaggctgcctaaagaattagaaagcaatttagaacttcttcgaatagaaatactgtgaaaagactgagatttagtttgacaagtctataatgagactatctgtatagaaaagcttaagctctttgatttttatctgacctgtgtttgaatattggctgagttgaaaaaaagatattgactatctttaatttgcatctgatcaccagttgaataatgaaatatacataaaatacataggctatgctcaattgaaactcgttcaaaatgtggtagtttgttaaaggatgtgtttctggcagaatgagaaacataaaacacatacagacatgttagtatatttttttaatgatgtccagagaatgattcacaatgtattttgtgttgccataattttataatactggagatacttgctttctatcattttaaaaatatattattctaaagcctctgaaacagagaaacttcagtcgcttccacaaaagtataactcacttgacattagatttattgaggaaaagaagctattatacatgtttaatattttatgttctgggctactttgctattaaatttaaatatttggaaggtagattcataaaatatgggtgtgataaaatacttattctatgaacactttctaccagtttattttggtaaacgttgagttactccaattatttttacttttcaaatagagcatttttattaacattgtaagcagtgaaaacattcatctggaatttctttttctttacctattcttataggaaatacagaaaaagatgactttttcttatactactggaactattatgatttttttccttctgctacataaatttaaggtatttttcaaagcccatccttttcagcaagaaagcattctcaaatttagtaatgtttaaaatcttcctaatattccttaagtccttgggaagaaaagacaatgaaaaacattatcaaagataaatattagcatacatttaaaaatctatcttcacctgcatttgtctcaagataattgtattgatgttataacattttttaagacactgtcttatttattgcagcactgctcataatagccaaaatgtgaaatcaacccaagcatccatcaatggatgattagatttaaaaatgtgatgtatatacacgatggcaaaacatgaatgaacttagagaacattaagtgggataagcagggaacaaaaggacaaatgctgtatgatctcactcatatgtagaatttttaaaaattgatcttgtagaagtaaggagtagaatagtggttatcagattctggagagagtaaggcgagagattgttctcttagtacaaaggtactgttggataggaggagtaagttctagtgttctattgcacaatagggtgactatagttaacaatcatatattgtatatttcaaaagagctaaaagagaggattctgaatgttctcaccacaaagaaacaagtgtttgaggtgatagatatcctaattaccctgatttgatcattatacaatgtatacatatatgtaaaatatcacaatgtaccataaatgagtaggattattcatcaattaaagacattgacactttaaaaaatatatatttttggttctcaaacagatgtgagggttatgtctaatatctttaaacacatcttggctttaaacatgtttaccagctatggcttatttattcccagatttttcaagtttcttcctttttcatctaaccttttgccctctctattgacattggtctttgaaaagtttgtataagaataccaaaagcatttttatatgagttctgccaactttattttgtagtctagaagttatgtatcacgtatttaaaagtgcttgaaaatagctgatgcatctcttttttcaagatgatgctaaaagtctcatctaatttaatggttggaacagttctttacaagttatgttgtaaaaatattcattaacattgatggagagtactactcaaacagcaaaaatgtgtctgtaaaagcttattaaaattcagaggctcaaataatgtaagaattcaaaatctttagtaaaattcaactgcagagtttctatcagatgcacatttcaaaatggaatttgttacaaatatggttcgtttctgagtaacaattagtttgtcgtggttttaaatataaaaggttttcacattaaaattgacatttgcaaaatggtcgttaatttgcataggttataaagctaatgtgaaattcagatggtcttacttagttcataagggtaacctagcatgttatttaaaattatttttcactaagatattttacttgggctataaaaataatatttcacactttatataactctaataaatttgtgataaactgtgaagtctccatataattcttcccgccaaaatgcatttttcaaattttgagatatctttttaagtacatattatgcattctattcttaagaaaattacttttaattatgtttttatatttgcacatctacttctcatgtactgaatacatataaatatatatgtgctttattactgctggggaaaattatactttattgctatgtattaaaaatcttgtaatgaattaaaatttgttctttttataaagtacttttatgtatttggagcagaaaactaacttattgcctaagtttttttctgccatattgaagcaaattttctttttaatatatagataaggaaaacaggtccagagaagctaacattcatagcagaaaaccgtaaaattatctaatattgctaaataattaagaattaaactagaatgctgtattgtacgggaggttacgttttttaaataattgtagtcaaacactctgactgtagttataatactggtaagcccaatgtttccaataataatttgataatgaaaagcatttctctcccatttcagcagaaaattatgaagaatgtctttgcaatattgaatcagatatcattttatgacagaaagtcttactcttcagaaaataaattattccttagtaaacacagaagataaaattatggcttggaatacaaaagaaatcactatcaacaaatttgtattttggaggaagtaaaatcattatttattctgttagcacattttcatttctcatttattttaacctttcagtgccttttttcaaggaaacttaacgtggtttgttaagttttttcatttaaacctctttaactgaaagtaactaaagaaattaatcaaggaaatgacattatggtgaatttgtgttttccaaagttttcagttcattgtataattttatgtaaacataaattaatgcatatttataaaatcctgcattaataaaatttatctttgaacccaaaagttagtaggttattaaagaaaagtaagatatcttgttagttctcctaaagctaacactagtttctctcaactaagtccatagagtatgaggtaatattaagaatggaaaaaaataccactgagaacgccggcatgagatttccttaatgtgccccccaaatgacattctttgatactacttttatgctattttgtttctgaaaacgtgcaattcttatagtattacatgaatttttaaaaattctgatctgtttaatatcagctaaaaacgatgtctcataatgaacacacacacacaaagaactgtgtctatcttagatttaaaaaaaaaacaactaaacaaaaacaacaataatgatgacaatcaatctccctctctattcctctaagaggtgaataacaaatggggaatgtatttgaaagccacactccctcacaaacagacaatatcctcataacttattctctgactttattcttcatgattctcatgtctacacgtggtctctcatcctattgcccagatattttaaaactttaccatttttagtgcagtcatttgaaataataaatgttgtcttaatctgcccctagatgccctaataaaataccacagactgccacactgtgtgctttaaacatcagattattttctcaaagtcccggagaatggaaagtctaagattaaagtgccaaacaacttgatttttgatgggggctttccttctggcttgcagattgtagtattcccctgtgtctttacatggagggaaaaagacaaacaaacaaacaaacaaaccaaaaaacaccaatctctgtgctgtttcatcttataaggacactaattccattgtctcaaaagcccacctgtattaggccgttctcatgctgctaataaagacatacccgagactgggtaatttatacagtgaagtggtttaatggactcacagttccacatggctagggaagcctcacaatcatggcggaagatgacagacgaataagggacatcttacatggcggcaggcaagagggcatttgcaggggagctccactttataaaaccactagatccggtgagacttattcactatcatgagaacagcatggcaaaaacccaggatcatgattcagttacctcccacaaggtccctccttaggcatgtgggaattattacaatgcaaggtgagatttgggtggagacacggagccaagccatatttaacaacttattttgaccgtatttaacatcaattactttcttactcaaaatgcagccacactgcattttaggactttcgcacatgaactttggggatggaggagggacacatacacacagtccctaaaaattataaattccagaaacaatataataatttaaagaatatatttacacaatagtatttttattacttaggtttccattaattttctctattgtttatattgccatcatttagaaaattggaacatagattatccttatattaaatttcccaacttcaagtttgtgtctaatttctacactctcattgttgtgatgaaattttaatataactctactaagggcattgatttcactaatcttttcccctttttaaatatacttatgtattaataatgttacaatctatttataggagacattattaaaacacagccaagagaactcaaaacctaatgatctgattgataaaacgtatgtataaagaacagtaatctaaccacctgtgttagtctgatagggctgccataacaaaataccatggactggatagcttaaaaacagaaattgttttctcacatttctttaggccagaagttgaagatcaaggtttcaacagggttgatgtctcatgaggactctcttcttggctttcagacatttaccttctcaccgtgtccccacatggcctttcctctgtgcacctagaaagagagagagagagagaactcatttattgctggtgagaatgcaaaataattgtcactttgggagacaatctgacagtttcttataaaactaagcatactgttaacatacaagccagcaatcatgctatttggtctgtacctagaggagctgaaagcttttgtctgcacaaaagcctacatgctgataattatagctttgttcataatccccactacttggttgaagcaaccaagatgtccttcagtaggcatatgaataaacaaactgtggtgcatcctaacaatggaatattcttcagcactaaaaggaaatgagctataaagccatgaaaagacatagagtaatcttaagagcacataacaaagttaaggaagataacctgaaaaggctccacactatatgattccaaccacgtgacatcctggaaaagtcaaaaacataaagacactaaaaggatcagtagtcactagggtttggactgggagagaggaaagagagatgaccaggcagagcacagaagatttttagggcactaaaaatcctctatctgatacataataatgggttcatgtcattatatctttgtccaaccctataaaatgtctaacaccaagaatgaacacaatgcaaattctgggtgacaatggtgtgtcaatgtaggttcatcagttgaaacaaatataccactctagtgggggatattgatcatggtagagattatgcatgtgctgagacaggggaaatataggaactccgtactttcctctcaattttgatgtgaacctaaaactgttccaaaaacaaaatcttttaaaaaatgtcagaagcactgagaatataatttgagaatcatattgtctctgagtgtacggttcctacttagaattttgcactgtatttgctttctccagagctgcatcactgatcatggctagcttgttatttactatgacacatagctgtgtttctgtcacacttgcacatattgtatttttgcattttaaaattattttcctctctagttatatttccttcatcttatctttaatgcatcttgtcctgtgtgtctttctattcttagaggtcattttaaattgttaccctatcctctcagttttaagccacatccttttttcctcttgctgtttaatgttatctgaagttaaggtgcacagttgatattctactaccttgatttcagagttttttcaggtaaatgattcacagcttaacactgaccacgcatttctaaaaaataaatgtaattgatgcagtaatcattctggttcactttaattgatgacagcatagaacttaaactcatgtttttgtgtaaagacttctaaattttttcaatggctccacactactgaagtaagtccaatttacttttgttctcatatttgccattgtctattatttgatcccaatgtgtttttttcaactttacctctcaccatttttctagcccatgaagactggatggtgagaagttgatggagaaaggaaattaaagtggaatagatgaaaccgaggatttctttcattaatgcatgcattcacatatccactcaatatttattaatcatctgctatatgctagatattttgcaggccttagagacaaaagaatgtaatgacatgattaagttatgttttggatggaaattattggaaatgcagttggtttacactgtagagagagtgaccagaaatatctagcctagggcattacacatgaatagaagttagttggaaggggacagagtttaagagtgagtcgaaaaagggaatgacatgaacaacagtttggaggaaaaagagaaaatgcctcatctttaaaactgaaagaaagttttagtatctagtaaagagtgccatgagatggaataggaaaggtcagctcatgaaatccttcatgaactcagttaagaattcagaatgtggaacaagagcatctacataaatggttgtgccatatactgtgattaatagcacaaaaagaaaatcttctttggatggcgataatgtttactttagtttggtggagggaaaatgaagatgaagtcattgtttcaactggagatgccaagtagtttatgaactatatgggtctggtatttgatctagattagagataaagatttgggacttaccatcaagctgctaataaaagccatgctagtggaggagatgccacagtgaatgtgcttgaatttctcatgtcgtatcgaagtctagaggtcagcagaacaagactggaaatttctgtcagggatccacgcctcatgatacttctggtttttattgcccgttaaaatgtggccactgctttggacattatgatgcaccattgagatctccactattgaaaggttttttttttttttttttttttttttttcctggttgttgaactatcagccccttaaggggttgtttcagctgcgaagagcttcttttcccatggtcgcatgccttgccagggtaacccatagccagtgaataagcaatacaagagtataaagccatgaccacttcaaaccaccatgaaactgttctgaagggcagctccaaatccacagatctccagagtctgcgaggggttatcatgggcctccatctctgttcgacttcttcctctgtccaatcctgtttctttccccacattctactgagaatgatataacaagccctattaataaatatcctgcatgccaaactccatttcagcgtctgctcagggaaaactcaacctgtgatttctgaagtccaagatggcttctccagctgctaaaattaggtccaaattctaatcaataagaaggaataaaaaagggataatagctgaactctttctttctacatttcagcaattccagagattatatagacatatagcctggtgtccagaacttagtttcaagactgcaggtagctgaaaactagactgaaaaaaagtaattttaattttgatttaccatgtacccagatagaattgtctctatgatgtctcttttcctttcttcattatgagaaaatgtcttaagcccttgtcagtcatctgagtgatgtttgtaaagtcaagctgtgaatcgaaaaggtgggaaaaaaaatgaggagagtatacctttgtatcagtggctaaatactgttatttttccaaagaaaaatacgacagtttcttattcagctaagaatttctgatattgagtccaatgtttggtttattttaaaaataagttattcagctgtatacagatgaggttttacaaattgcattaatgacatatttaatatacttttactcactctttactatgtaccagatgctatcctatgcattacattaggttcaaaagctttgcctgagtgattttagaacacatagattcactttgaactcttaggtttgccattgttgaaagggaaatgatatttctctcagaacatttattgctatgcgtgattatgtcttatgcctcagccatgctctatcccatgagggacaaaaaagccagttgaagagataacatgtaaatatatgagtagttaattaacagatgtcatcacgtaatagcccaatttgcgacacatttacactgaggtttgtgtctctataaggaacttatgaatgtctaaatctgcatacttttcatacaaaaataagcccatatcaaaatatgcccaggtctctgatgccaaagggtgtatttttcatttgaactcatttgaacatattccacctactgagactgatttgtgcttttaacaaaacacttaattttcttctactgctatctaacagataacaggagaccagcttatcaatccaaactgttaggctacatatacttgcaatgagatcaatcatcaactgtatacatatttatatagacagagacacacacacatagacagacacacacacaaaatacttttcattttcctctactgctatctaacagataccagcagatcagcttattaatccagactgttatgccagatatactcgcaatgagatcaattaccaattatatatatgtgtgtggatagatagatgtggttatatttggagggttcattattcagcctaccatattatgtaaggcacatgataatctaataatctaaaagtaatagcatatcctgggaaaaggtatttctttttttttttttttttttttgagacagagtctccctctgtcacccaggctggagtgcagtggcgagatctcggctcactgcaagctccgactcccaggttcaagagattctcctgcctcaggctcctgagtagctgagactacaggcgcctgctaccacgcccggcttatttttttttttttttttttttgtatttttagtagagacggggtttcaccgtgttagccaggatggtctcgatctcctgacctcgtgatccgcccacttaggcctcccaaagtgctgggattacaggcgtgagccaccgcgcccggccaggcagaggtatttgtttaccaatattccaggatcctttattactttttgcaaacattactctctttgcatttttgaagcacatgttttcttgatgttgacttaacctcccaatattctgctttcatctttatatttctactcttttgcccatgggcacacatttgctaggtagtgtccttgacataaaagtgctgtaacctggagatgctcacatagttatcagttatgagagatttgtaagtaaaggaagtgacaatccctcagggtggaaacccagcctctgtttttttatatatttatagaaacatgtttttctaaacatgctccttttagtctgcaagtttcagtatgctcctttcagtttgaaagttctcaactattaagatttttccttgcaatttcctttttatacactagataaaggaaaaattgcatacaatagtaagttttagattattgtgtgcattacataatgtagtaggttgaaaaatggaacctccaaatataaccacatcctaaccatggaacctgtgagtgttatcttacatggcataaaaagggtttggagatctgattaaattaacaatcctcagataaggtgattattctgaattatccaaatgggcaggtcttaaatgcaatcacatgtacccatataagaaagagatttaacacaggctacagaagaagaaaaccatatgaaggaatcagcaggaaacaatcagagagtgaagctatgctgctgactggaagatgcaggaagggctcatgggtcagggaatgcaaccctacaagctgaaacaattctcccttagtgcctccagaggtagcatagcccttggtttcatcccaaggaaactgatttttcacttctagcttccagaaatgtaagaaaacatatttgtcatgtttgaagccatagaatctgtggaaatttgttataacagctattagaaactaatatacttgctgtataataaatgaacactgtaaatccttacaggtcacagaatattcagagaataaattttcataattttggttttaagaagttcttgttgttaccttagcttttcagagagtacacagttaaattctgataaacaaattctagtatatactccagacatctctacagtacatggaataattctacattgaaacactaactacaataatcattattgcagaaggacaatgcatctgtgattctggcacaaacaatttaggtacaattttccctcacatcatccttctgattgttgtatattatttgcgtctgaatgttcttagaacttcttagaagattccataaacatatgttttgttaaagctctacattaagtttagtttgtatagaaatgtaaaaaattatagacttacattttcctagtactttttatgtactttgcaatgcctaaataaattagatgctgctagaagcaaattttagttgctttttctcagttttaaatgattttcttattttgttttctgacaaaagttgtgtagcctatttcggacactccagcatgtggaaaatagcttcataagataaaaattaaaataattaaaaccgtgtaattagaaaaactaaataaaatttttgaaagttaatttgcaacacctataattgccaatgtgtgatagagtaacagtaagattccctacagccattgaaacattaattgatgacaaatgattcagtgattgactttattgccttcttgcagctccaatgtagattatggtaattaatattaaaaatcatttcctatttaacattttatgctgacacaaatcctttattggttcatttgagagctctttcttaaattatgccattgactgcctacttagcacaacaagtaatggagcatctaataattacgacagtgaaacatgaaccttattttaaaaatttttaatgatggaaatgattaaaaaccataatcttactttagataacaagctgaccaatagataccacagtctttattgaaatgtttctcttgctgatcctctgacacacttccttgcatgggctatgccatttttttcaatattttcctcctgatatggtttgactgtgtccacacccaaatctcaacttgaaatataactcccagaattccaatttgttatgggagggacccagagggaagtaattgaatcatggggggttggtctttcccatcctattctcatgatagtgaatacgtctcatgagacctgctcagtttatcaggggtttctgcttttgctcttcattttctcttgctgccaccatgtaacaagtgcctttcgcctcgtgccattattctgaggcctcctcagccacgtggaactgtaagtccagttaaaactcttttccttcccagtcttggatatgtctttatcagcagtgtgaagatggactaataccgtaaactggaaccagtagagtggggcattgatgaaaagatacccaaaaatgtggaagtgactttggaactaggtaacaggcaggaattggagtagcttgaagggctcagaagaagacaggaaaatgtgggaaagtttggaatttcctagagacttgttgaatggcttcacccaaaatgctgaaagtgatatggacaataaaatccaggctgagatgatctcagatgaagatgaggaacttgggaactggagcaaagagagtggtgacattttgccccttccctagagacttgtggaattttgaacttgagagagatgatttagggtatgtggtggaagaaatttctaagtagcaaagcattcaagaggtgacttgggtgctgttaaaggcattcagtttaaaaaggaaagcagagcatgaaagtttggaaaatttgcagcctgactatgtgatagaaaagaagaaacccattttcgggggagaaattcaagccaactgcagaaatgttcataggtagcaagaagcctaatgttaatctccatgaccttggagaaaatgtccccaagaccacagggaaaatgttctccatgtcagagaccttcgcagcagcccctcccatcactagccctgaggcccaggagaaaaaagcagttttgtgggccgggcccagggtcctcgtgctatgtgcagcctaggaacttggtgccctaggaacttgtgttccaggaacttggaacacagcctaggaacttgtgtcccagttgttccagccatagctgtaagggaccaacatacagctcatgctgtggcttcagacagtggaagccccaagccttggcagcttccacgtggtgttgagcctgtgggtgcacagaagtcaagaattgaggtttgggaacctccccctagacttcagaagatgtatggaaacacctggatgtgcaggcaaattttgcttcaggggcagggctgtcatgaagaacctctgctagggcagtgcagaagggaaatgtggggttggagcccccacacggagtccctactggggcactgcctagtggagctgtgagaagagggccatcatcctccagagcccataatggtagatccactgatagcttgcttcaggtgcctgggaaagccacagacactcaacaccaccacatgaaagcagtcaggagggaggctgtacctttcaaagccacagaggctgagctgcccaagaccatgggaacccacctcttgcatcagcgtgacctggatttgagacatggagtcaaaggagatcattttggaactttaaaatttgactgccctgctggattttggacttccatgggcccgtaaacactttgttttgaccaatttctaccatttggaatggctgtatttactcaatacctgtacccccattgtatctaggaggtaactagcttgcttttgattttacaggctcataagcagaagggacttgccttgtctcaggtgaaactctggactgtggacttttgggtttatgctaaaatgagttaagactttgcgggactgttgggatggcatgattggttttcaaatgtgagaacatgagatttggaggggcctgggtggaacaatatggtttggctgtgtccctactgaaatctcaaattgaattgtgtctcccagaattaccatgtgttgtgggagggacccagggtaagtaattgaatcatgggggctggtcttccctgtgctattctcgtgatagtgaataagtctcacgagatctaatgggtttatcagtggtttccacttttacttcttcctcattttctcttgccaccaccatgtaagaagtgcctttcatatcctgccatgattctgaggcctccccagacatgtggaactgtaagtccaattaaaactcttttcctggccgggtgcagtggctcatgtctgtaatcccagcactttgggaggccgaggtgggcagatgagttgaggtcagcagtttcaagacaagcctggccaacatggcgaaaacccatctctacttaaaatacaaatatgggccgggtatggtggctcacacctgtattcccagcactttaggaggccgaggtgggcggatcacaaggtcaggagtcgagaccagcctggccaacatggcgaaaccccgtctctactaaaaatacaaaaattagctgggcgtggaggcgtgtgtctgtaatcccagctactcgggaggctgagggaggagaaatgcttgaacccaggaggcagaggttgcagtgagccgagatcatgccattgcactccagcctgggtgacaagagcaagaatccatctcaaaataagtaaataaataaataaataaataaaaataaaatacaaatacaaatattagctgggtgtgttggtgcgtgcctgtaatcccagctacctgggagcctgaggcaggagaatcgctggaggcggaggttgcaatgagccaagatcttgccactgcactccagtctgggcaacagagtgagactctggtctcaaaaacaaacaaacaaacaaacagacaaaaaaacccttttacttcccagtctcaggtatgtctttatcagcagtgtgaaatggactaatacacctccattccttattttaaaaagatgaatttatctcctacctcgctgaagtccttgagcttaaaatgttttagatccctaccctgtatttcctaataaacctttccttatcctagttcactcctgatctctcatatcaagatggggatctctgctctcatcacatatgtctcagggaagacaatccattcagcatcttctcctctacctctgtgcttaaatttctattaaattaatagaaattcattaatttaaatttctgtattacttcctgtattcctgcctctaaatatgttctagtttgtcttatcctgaaagttttcttctttagatccttaaatttatctgtttcttttctttctctgaaaacattttgaaatgtagacatatcttgctttcactgggtcattatctactcacttttcaaactcttttttttttttttttttttgtgagatagagtctcgccctgtctcccaggctagagtgcaatggcgcgctctctgcttactgcaaactccgcctcccgggttcctgccattctcctgtctcagcctcccaagtaactgggactacagacgcccgccaccgcgcctggctaatttttttgtattttttagtagagacggggtttcaccgtgttagccaggatggtctcgatcttttgacctcgtgacccgcccgcctcagcctctcagagtgctgggattacaggagtgagccaccgcgcctgaccattacccatgctcttaatcatgatttgtgtttcctcttggccaaatcctgtgttggcctatctcacttataataagacggggactgctgtcctccagaaaatgttaactaaaagtactgaattcttcatggcatatgctgaatacatgggctgatcatagatacaattcacataaaggtgagctacgggacactgtggactgggctggctagagaaagcttgcaaaaagagtgggaactgataacgcttgggattaggagtaaaagtcataaagtaagggtgagggaaaggatacggggtggggggggcattccatttgagaacttcagaaaagaggtgacaaggtaggaatataaaaggaatatttagaggtcagccttggaggagataatgatttttatgcctaggaatagtggaaaataagtttgggaatgtagttggggcatagatttggaaaagtgcgagagtacacatttgaatatgatattgtagaaaactgaagacggttaaaaggagtgatggcaaacaagcaggaatttagaaaagttaatgagatgggttttatttatgctttttgggtaggtctacagggagagtctaatgcttgggaatcgttaaagtggtcattacaacagtctaaatgtggtgttggaagcagatatttaccagcaatatagatgctttagaagagagttcacagttcttgagaagctactgaaatttgtgtcaaggtaaagtgaggttttaaaaacagcttctggaattaacctaaatgaatggaagaatatgagtcctactgaaagaaatgggattctctctatatattataaaaatttgactgatgactacagtagaaattgtgcatcagttgaagaaagaaatagctaatgctcatagtaagaacagcagccagtggctttgcatatttatcaccagagcttctgaaaattatttttatttttcatttcttttttctccttctcctttcatctctttcttctactttccttcccttccctcctttctttaatttccacttttccttcttctctccctttctcccttcctcagtatttttaatttgtgtttaaaataaatatttattaagcatttattctgggactgtagtttttctattttatctctgggtcagtaacaagccttgtaaattaattcaacactgggactgggtatttgagctttggatcatgaagtcagcctgttcagtctgataaactaccacttcgtttacatagataatgaaaatatcaagtccattattaagataaattagaaatgaatgtatgaattattgggtgcaataaataaatctgcatattaaagaaatctatggaccaaaatgtattacaatcatatatcaaaaataaagcttgtgtacatgggtgcatgtgcatgtggttttatcttgtgactgtgtggggacacaaaaccaattattgtcttttgaatcaattttccctgacagtttagatttaagcttgatgacattttgaacctatttcagcccatttggaataaatttatcaatttcaactcacatcttcttgataaaaccaaatttgtatccctatttctccactaatgcatggaccattattgatgttccttctctccactttgcaggatcttaaagtttttccttttatgcttcttaagatttgattactagcattgtgaatactgtatgtttctcctcatctttctccagggtaaagatctgaacgtctttgtcagttcatacaaactttgaatattgttgccaagcacatgatagatatcagaactgggtgtatttcatgatcaggtgaattgaattagcttatcagatgaatggttacttaatttgttttgtgaaggaaagctaactgggttaggtgacttccaaccaaaggtgaatttaaggacacatgattcaagccttgaaatattacagaaagtatgccatgtttagaaataaaactgaatgatttttattataaatactaatatcatttttatgttctctgtagttcacttcctgccttgccaacgcctttaggctattttgcgttccccatatgtgggaatggatatttttagcattaagcagaaaagagtcacagataacagtgttttccaagtcccagggtgagaaagaagccagggatgatgcccttggcctttcaattggcttgaaagtagcagcaagagcagcagaatctgaatgaagtcagtagacaggaaaggagaatgctttaatgacaacctgaaagaatgagtgactgaagaccaaatgggatcaataaaatctcggaagatactcagatgaacagattacttcagggctaggagattccaacaacatctcagtactaagtaagcaccccagtttgagtgagttcgggttgaaatgcatatcaaatttcaaaagaaaacaataggctcataagggttgtataccttattgccatattctaactgggctttgacagtgaaatattgagttaccactttttaaaatgacctgacattgcagtgtctatagtttttattcaaatgacctaatttcctttttattcatttactaagcatttcttattttcccttcttttgcagtgtaggttatgttagtcgtaatatttactataaaaattgtattatctggtaatggtaatagtagtaatagtagataataggggtaatagcaattatagaaatagcagcaatagtgccaaaggtggcagaaaaacacctaaaaattttgaacagccattaggcgaagcactttctctatcaactgtgctaagcattttctatagagtaactcatttaatattctcagcaactcttgaggtaggtgagattttaccctgttatataaatgagaaaccttaggttcaaaaaaattaagccacttcctcacgttattcagatgatgagtgtgagctataattcccatggagagcttgctctcccaggccccctagtagacagcatgatatgaaggagaaaaattaggcaggcagcaaatgttagctctttccctgactgttacagtggcttttgaactttggcaggtcaccagtatctgaagaacttcttgaaatgtggattgctgggcttttcccccaggtttctgattaattaagactggaagaaggccccaaatgaacatttctagcaagttcccaggtgacactgctgcatcttgtccaaggctcacactttgagaacctctgttataggtttagatacgtgaacaaaacccatgaaggtaaagtggtcttattgaaggaagtgtcggcactatttatacttggataagggcatgtgatcatctaatttgatcatatctattcacacagttacgaccacttctgtatacataaatataatataaagatgaaatatatggtgcttgttgttaagaaccttaaaatctggagaatgaaggcaaatctataagcaaataaggcaccaaagcttatacatgttttgcaaaaaggcaaaaatgtatatatggcataaaaacaaagtataaattttctacttgaattggagtatgcagtggggagtaagatagaaaagttagatagagaatttgatgtcttagctaaatgctgaaaaccaagaagatttgcactaatcactaatcacatagaacaagggcttaggataaagtgtgggatggagggagaatgatgttatagatagtgaagaatgtgaaagcaccagattaacatagtcatgtatttaactaaagcatttgaacttcatgctgtacacaatagtgaaccttcaaatgttttttaatgagtgtaaattattatccactttgtaacttatacagcatggtctgacaagtttgaagagtttactgtccaagaggcagatcaagatcaggatgattaattttactaacgaattagtcctaaggaaagatgagttcccacacaaggaagtggtaatgtatacataacaaggactgaatttgacagctgattaagaaatgagattgacaggattcttaaaagtgtctctcactggtgttgataggtactaaataaaaaatgaatcaggttctagctgaaaattatatagtccagtggttctcaaacttcagcatattagaattatatgggcacttaaagcatactaatatacaggccacaccactttcaatctactcagaatctttggaatcattagtaattcccaagtgattcaaataataatggtgctatttaataaatagagaacagatctgtaatatggatcagacttgtaaagaatgcagagagaggaagagttggaagatataggagaggaaatgagataactgaaaaacaaattgcctggagacaatagaagaatagagaatgaaaaacacaggtcgaaatactaaacctcaaattcgagaaggtatgcttcagtttctgagattaaaggaaagtaggtaatgctcaagcacttagaaaaaaactaataggaaactttaatttcatgtatttggagtctagtcttgaaagtcacctccgatgctagagcacaacccaaattttgtattttcccttataaacttaataggtgatacaaatatgtgttagaaatcagtctaggatactttgacatatgtcagtgactgaggaacgggcatgcaaggaatgtttaaagaaatatttaattttttgaaagaagctataagcatagcagtttatgtaaaaaagaaaattccaataaaatatacaagcccaaagtatactatatccatgggtttctttctgcttgtgggttgtattttgtaatcactacccaaaagcattgttttcaagcctatttttttatcaagaaaagtttgtccaaaaagaattacataaaaatttaaaataacaaataaaaaaccaactagaatggctctagcccaagctatgaaaggaagtcattgctcctacctgcccatatctccactacagattgatggtcagtgactgagagtatatcaagtttttttctgagaaatcaattgaataaaacttgggattgaatgaaacctgtcttttttaacaaaatgcaggacaagcataaaatttacagctattctttttaatatggtagctactaactacatgtggttattaggtctttgcaatatagatagttaaaaagatagtctgcacatttgattttatacacatagtaaaacagaaggataaaatgcattaataatatttactgtattgattacatattgaagtaacactattttgaatatattagattaaatgtaatatattgttaaaactaagttcatctctgtcttttctaccctttaaatgcagctgccagaaatttaaaattaaatatgcatctcacattttgtctttattagacagtgctaatctctaagcatttgggctttagggaacatcaatgaatattaagttggaacttaatttagcttatggaggatggtcccaattagctgttttcaaactctttatatatttttaggattgaatcaaaagtttatttagagaaggaaatgttttaaagttattgctgctatagaatactttaaaaattataaattaccaatacaaaaggtacattatatttttctttcatctctatttttcttcagtagcttttgtgatttttaataaagtcttgcctctccatatgtatataatttcaaatatatttttctttatccctttttatcctcagaataactctgtgataggaaataaattatcttcactttagctttacctttcctttactaatctgcctatatgcagggagcagagcatcttacagcaacatttcttcattataatttagacattcattcaataatcagtcaagagatttgtcttatttttgcataattgatataattttgaaaggctgactgtcctcaatattgttcttttggagcccaacatgctacttattcatctatgggaattcaccgtgacaggcaatgcagccattgaactttggatagtacatctgtgcctattagagataatgccattgaaaagctcctctttagaaacactgaagacaagaatgcaccccaaactacgctggggaaaaagatggtattacgaagtcaaaaatttctaactttcttaaataatgccccacatcttcaaaaagcttggctacagccctgaattgaggtcttcttcaatgaaacaatctagaagttctagctgtgtactaaggtcaccactgaaccaagtgagctgtgctcacaattgcctgctggtggaaacgatcagtggtgtgagccaatacttgcatgtgctagatgaccttatttgaacagtgcgtttttaacttcatagacgtgtctccatagcataattactttgaaaacctctgtatcagttttctaatgctgctgttataaattaccaccgactcgctggcagaaaacaatacaaatgaattatcttgcatttcaatgagttagaagtctgacataggcctcactgggctaaaatcaaagtgtcagtacctactgcactgtgttctggagactctgagggacaatctattttcttgctttttctggtttctaaaaaccattcgcattccttagctcatggccagcttccatcatcctcaaaaccagtgcctttgcatttgtcgactcttcctctgattacaaatgggaaaggattcccacttttaaagagtgtgtgtgtgtgtgtgtgtgtgtatgactgtatgtgtatgagtgtgattagatcagactcaagataatttccatatctcaagggcctttgcttatttttacaaaaccttttttttctgtattggataatatattaatatcaacaagatctagtgattagaatggagacatctttttaaaggggattgcattacactgcctacagcctcctctactgctctgagtattttgataggaactatatctctcactagcagggatcctttttcctttcattttatatagatattctgtcaaaaaaaatgtctcagcccataggacaataaaatacctatttaaaagccatttatcttataatggcacccttaagtcatctgaatatccattgaaaccaagattgagcttagtataaataacataggtatataaggaaagttggttaaaagtaaaattgtgtgggtttttttttttgtttgttttgttttgttttttgtttgtttctgaggcggagtctcctctgttgcccaggctggaatgcagtggcacgatttgggttcactgcaacctctgcctcctaggttcaagcaattctgcctcagcctcccgactagctgggatgacaagcacatgtcaccacgcctggctaattttttttttgtttttagtaaagatgggatttcatcgtgttacccaggatggtctccatcccctgacctctttatccgcctgcctcggcctcccaaagtgctgggattacaggcgtgagccaccacacacatctttaacacacatgttatacatatgatatttcattgtcaaaagcaattttctaaaattccaaaagatttatcttatttgaggttcaaaataatgggattaggacattctttacgtctcctattggatggaccatttttagggcagagtaaatattaagccatcatcaattaaaacttactcactgtatgagttagggtaatccagagaaccaatagctctatcaatttatcatctatctcatcatctatctagaaatatattttaagaattgactctagcaatgtgggggctagtaaatttgaaatttgtagccagcaacctggaaattcaggtaaaggttggttttgccatcttaaatctgaaatagtctgcatatgagtcaagaggctggaaactcaggcatggtttctatgttgccgtctggagaagaaattacttcttctctgagattcttccatcttgtcttttcatgcattcaatacattgaacgaggcccactctccttttggagggtaatctggttttcctttaattcctctgattgaaaattttaaaaacacacacaaatatcttcacagcaatatctagaaggatgtatgaccaaacaactgggcatcatagcctagtgaagctgacagataaaattaactgtcacattttcagaaagtatcatggaattaaagcttcctctgaagaactcattatttttgtgaaaaccttttacaatcaaatactatcttacaagctattgattcaataattatctattaagggcttactacactgtgtgtgtatgtgtgtgtatatgcactaaatgtatctcttcagtttttactgcatgctagttgctgcatttggtcatataaatatgaatgacacactgtccctgacttcaagacaattgttgttaattataaaggtaaatgcatataaaaaatcacagtacaacattcttggtgttaagaagactgggaatgcactggcagggctgcagcatgaatggagtgcaactaacacatccttggggagtcatatttgaaggaactgaagaaactgcaaatgaacaaaataggaagtggcaaaataggcagatcatagatcaaatagcatcacattctattgccggtttatataactgagtattttggtatatcatgaaagcagggcgggatgttaggaacataagtggagtcgtattgtgaagagcctcggatgtcagaccacatttttcttacaggaatgagaggacattaaggtagtagctgttaaccagtgaaagacccagatttgcctttgcagttcttgaaaaggccatttcctttgcagaaagagactcaattcttgctctttctctgtctttgtgctgctataacaaaatatctgagactgggcaacagataatgtaaatatgtaaataagtggatatagaaatgttataaatttatttcttgtagttctgaaggctggaaagtctaagatccagtcactagctggtctggtgtctggtgagggctgctctcagctttctgggatagtaccttgctgttgtgtcctctgaaaaggacaaacacagtgtcctcacatggcaaaggcagaagggcaaaaaaacccccaaaaatcctagaacgcaaaaaaaaaaaaagaaaaaaagaaaaagccgaatgctgtttgaagcctcttttatataggccttaatcccattcatgagagtttcaccctcattgacttaaacatgtctcaaaagccccatcttttaataccatcacagtgggaattaagtttcaacacataaattttggagaacacgttcagaccatggcactccccacacacggtgtgtgaaaaagagaacatgaacattcgcattcagcaattccaaatattaagggttgagtctaatttttaattactattgtaactttttagtaacttacaaagacacttctgatttatagtactgccaagaatgacaacatttagggctgtaaatcacgagagaagaataactccttttctttgtctagtctcatgctaattctaatggatccagggcacaaaatatagaaatgaaataatttcctcattaaatatgtctccataaaatgtgaaatgcatagtaaagatgaaagttttctttttttcatcgtgactggtttcataaggttcaactttactgaaatgttctactttggctataggcacgttaatgtatgagtgtattaatttctatgcttcataacaaattatcatacacttagtgccttaaaacaacacacattttgtatttcagtttctgtatgtcggaaacccaactatagcttaattggacctcaccaggctgcaatccaggcattggtcgtggctttagtctcatcagaggctctgctgggatcagagtcaccttcaagctctctctggttgttggcaggatcaatcttcctggatttgtaggactgtgattcccatttccttgacggccatagcctgcaggcctctcttgtctcctttaagtgcctgaagtttttattttttttatttgccacattagccactttatagatcctctcacaaatggaagcatactttcaaatccagcaaaggtgaattttcacgttcagtctgctagaatgaagtcttacataatgtaaccacgggaaccatggcataggcgttccatcaactttgccatattatgtaagcaaaccataggcatgacacgccattactgttgccatgtttgccatatgctaatggttagaaacaagtcacagttgccacctccagccaagggacaggggtggcagggagaacacacagaggtgtgatataccatgaggagggaattactcgggatcctcttggggaggtctgccacagtgaaacataaaaacaggtcatgttggttatgttgaaatattttggaacctccattcttgaagtattctggatcaatatctaacagttttttctagaatgcattaattgagaaatattttttttaaatgtcccaaacaatacattcatcaaactgctaggaaaaaaaaatgagattatacaacattttattaaaaagaaacttaaacttaacaaggattagtaatccgggggaattccaacagcaaacaacacagataactcttttcctttcatagtcatatttacattattttatttcgaactagatattttccttaatatatgtacagcttggttgcttggcttgattttacatatatatgtattcatgtatatgtgaatgtgtgcataactttaaatatatatttttcaatatctgaaagcactgaaatgggaactttactgttatggtgaatagatatttctatgttgaaattttgactatcacaaatttgcattaagaatatgtaaatccaaaacaagctatataatgatctcaaacattgcttttttgctacattaagtttaatggctcaatctcaagctctctgtaggagggcaagtatttccacctctgcaaggctttgcagaaaagaaaattttggtagaatggccacactcatatgcatacctggcagccaagggtacatgtgctatattccctataacataatgtgtcacttcatagtgagaaaatgtccacagaagaagatgaccaatgccctaccaggcttcaagacagacaatgattatgactagaatgagatgatcctggagcttgtcagtggaacctatgcatcagtagaaatgctgtcttgttaactattagatctgcaaaactataaccaacaagctaaagctgttcatgttctcctgtagaaatgcatcttttatgctgtatttacaattattatgctgtgagtcaggatttccgtctcacatccatcacccaattgtgtaaatcctgatttgggacagaattccaatatttatatgaaacatgaaaatgtggatcatttctctgttgttatgatatttatccaatggctctgttttgttccacttagggaagcctatttaattaaaaaaatacgtgctgatttgtgcatgattttgtcaggaagttatttgttgttatggctttgtatttttgctgttatgtatgtactctctcggtacctggctacacaaaattaatgctcctaacttatccagatcactgtgtcttggtaagcttctcccatcctgtttctcttactcttctgtgcccatcttcatatatgaactaaaacaatcctctaatttgcttaatgtctttaaagtggagtatgtacctgaatcaaacagaatatttgcaaaacttgtcactcatattttgagtttctactttagtgtcttagtgctttctcgatatgggagaattcatgtcctccattcagaagtatgcactaagtaagaggtatcatgtctggttcttgattaggtactaatcttgaaatactatcctacagtaggttagagcacgtatatctcctgataatatattgaatatgatagatttaaataattggttaactaaatactaaagcaaattgctgcacgtatcatttattattcattgtgtagaaagtgcctgactcagtgtttggaaattgtctgacttttcctcatatatagtgtggtttcatgttattgtatataagacctgacatgaaccctgtttacaataatctcccagtgccataaagaccataataaataatataaccaattggtttctttatgctgtcatttattagggcatatggcattagtggaggattaccttgtattacccatagtgcttagagtatgaatcacacatgcaccttgaaggaaaagaggtgcaatgtaataagaaaccagatattgaaaatgcaagttttgttatgttattctgggtatgttaacctttattcctgccctccatatgcactgtagcaaagtctgcctattcatgcttcatcccaccacttcacagctattgctccatctgccttagtgattaagctttatactacatgaactagacttcccctccatgatcacaccaaagcattcaattcaattcacgggtacttacagtctacagaatgggctttgaaagaggataatacctaagcacctcttgtttcataaaaatttgaattcaggctatgtaactatagtatagtatagacgtttctggaagatgattagttgtattagaatagagaagctactatcaatcatgtttccctgaagttggaagagcacattactcccttttagtgtctgagttacattacatatgttgaggactgttataagtaagttggagttagttgactgggactctgctaagcaagagaatcttaacaggtatagttatttgagtaaacagggatgggaatagtttttaataacgtagaatatgagttttctttgtataaaggtaaaatgctgaaatatttcatgcctgatggtcattacactgtatgtgatttataccaggaataagctgagcctcttcccaccatgccatttcatatcagccataaatgaggaaacaaatgagaaagttattatttgccgtgtgattaagtagtcagtcaaatccattctgtctaacaagcgattgattgctttagaatgggagccagaatttataagggtggggtgatatactttggagtgtggggtatgtaatcaaaatttttgtggtgtattgcatttttcagtgaagatcacaacagtatctccattccataagttctttctacagtgcatcctgtgatagggtctttgccctctccctttgaaactcactggctttttgtgactgcttcaatatattacataaaaatgccatcatcatccactgtgatcttttgagatgtttgctgtagaaaaagagccaccacgctgtgagaatgttcaaacaggcaaagcagtgagactccgtggaaaggatgtatgcatgaattttgactgacagtatagctgagatcccaactgatagctagtaccaaatcaccacctatgtgagtcaaccattttggtagtatgttctccagttctgagatcaattgctttaaactgacctcttgaatcaaaggcaagctccctactaaacccttcataagccctgcccgaggaatagatacagaaacaaaataattgttgttctttcaggtcagtaagttttctgattttcttttagcacacagcaatgaatcatacaatcagcgactaatatattgtgctttctgtgatcttttaaaaaattttttataaatggaatttactagaataatacccttgaaatgagtctttaaatgttaacagttgtccaatggtggaaggagacattcaaggggggaaaaaggaatagattatgaaacatttatttttggaggttgcaattatttaagaatagctaaagctggaagtcctaaataggacacagtaaaagatgacattggtggtagaagcagaaaccttatgatggaggttatctatctatctatctatctatctatctatctatctatctatcccctttctactaaggttagatttgattttgaaggtaatacaaaatcataaaggactttctgcagagcaagagatagttggatttgcattttaggaatatttctagagacagtgatgaaatatcatcaccaagtatatatatcatacatactctaaccgaacccgaacccgaaccctaaccctatccctaacccagttaatagatgcctggtagagatctgacacaaaaatattaaaacttataatcaagtggatctgactattaattaaatgtgaagagtgaaggtaatagagtctgaaaaacttcaaatgaatgacttgccaggtaatagagcaaagggccagactgggaggggttgagcaataataaattcagctttgcccatgttacacccagtcacattcttcttcttacttaatttctcagaccaaaaccttgggcacatccttgctttttctttctcagttacaacactctgaagaatatcaagtatgattacattccaagtcaaggatacatcttgtcaccttcaccaatgcatcttagtcttcaaactgtcatcagttgcaaaccgataaagcatgtgtgtgttaatgttctgccctttaccatgaaatcaatattgttggagcttgttgaatgagaaaagtactaatggaagatgatgtcagaaagacaagattgagcatgagttggctttgcaggctatagtaaatcatttggaatttattttatatttcaaaagaagttactgaagtcctttcactagccaagcaaagcatctgatgatgtttttcaacaaatgctgctgtctggagaactgaatgtaggatggcaaggataaatatagctagaaaactctttctgtaatgtaaacatgaggctggtaattctttttcctttgtcaaatcaaactcattccaatcaaggcaccgtccttgtttatttatttacctagacggtcttttcctcagagtttcatgtcttgtcaatgagatgtaggacatatcaagatcaaagagttcttctttcagcatatccttccaaaagtagcttttcgtcttgtcatacattgaccgatatttttcctttgaattttcaaagcacagagcactctaaggagttaaattatttacttaattgtttctattccatattttcccattagaaatgtaaggcatctgaggatagaaaatatatttttcttactgacatcatattcctaatgttcagcgtagtacttagagtgagatttgtattcatcatgtttgtaaattagctaatgaaaataaaataagacataatttaaaatttgggagatatttgcttggagagaaaaattgaaggagattttctaaaatgaagatactgctttagacttgatgagggggaaatttttgacatccatcatcaatttatggatttacagtaaattaaattatcttttaaaacatagcagaaagtaaatcataatctttaataaagaagggaaattgaaggaaacatgtctccattgagtattaggcattctgtgaggtacttaatatatttaaactcatgcaaatctccaagagccatgactttaaaaaaaattcagttattaataaaatatttatgtttaaagcatgaagagttatatttgttaaaatccatgtacttatagaacaatgaaaaaatcatgtgtaaaacacacaacattcggtgtactcagttttgacaaatatttatcttttttagcattgaaaataggaatgttatttgcatttggaaaaatatttctcggatatattggtcactaaacaatgaaataacatgtcatgattgttttatgtttacctgtcttgcaaaaagctagatttgactaacaataaaaatgtccactgttaaaatgcctgcagaaacacttttcacattaaattataaccagatactcacgttcacattgccagggcatcaataaaacaattccaagtttatagcacagaggtacattgtacccagtgttgttattgtgacatattgtgctgccttgtgctgtgtcatattgtaattcagacattaacatatgtgactaccactctttatgtagaaaatacagtgttctcatttgttccaaaaattgtaatatgcatatttcaaactacaaaatatatctattttcacggtagtatcaattatttattgagcttcttcataatatactagtaagcatattttaaattaagttgtgaaaataatgaataaataaataaaataaagaaagagctgcaagttgctgagattctgggacatgtgaatatgttatctcagtaaagcatggcctgtgcagtattactccagttcctttctatttatgttcctcagacttgatttttttaagctttaaaataattaggttaaatattttgtcaaactttagaaaacacttcttatagacaaattgttggacaaagaaaggaacaataagaagctgtgggaagtaaaagtaatattttgggagtcaaaattgtcatttctctgtgctaggattgaagatgtatacacattatcgtcagcattcacacactcactcacacacacacacgcaatttgtaccttaaaatactatacaaaataaaattggtgcctaggaagagatatagagttcaaacataattctcccataaatacatccccattactattttaaatatgaactctcaggaggattatagtgttggggaaaaatgtcaaatcagcaggtgagctgttgaactttcaactcattattaaataaaaccagttttggtttttatgtgtttcacactttgttcatccataattccctttgaactaggggttgtgggactgttgtgggatggggggaggggatagcattaggagatatacctaatgttaaatgaccagttaatgggtgcagcacaccaacatggcacatgtatacatatgtaacggagctgcacgttgtgcacatgtaccctaaaacttaaagtataataaaaaaatgaaaaaataaaattgagaaaatccaaattatttgtggaattcaacattaacctaaaaaccgaaaaaaaagacaatgtaggatataactgaaagacaaaatgataaaatctaataatcaatattgtattatcttttagcataaattaataatcttgagtaaggttgctaatatatatttcaaatgatacattaagatttaacaaataattaaaatttttgggaagggttataggaaatttaaatctattatttctaattcattgatacgtttaatttaaaaacctttagtctctctactaatacttccattttaagaaggagatggacactcatagaagtaaaataatatacccaatgttacacagttaattaattgttggagatatttcaaagcagctcataaatgcttcagagtctattctctttgactacattacactgctatcaaatttcatgaaaaatctcaaaaacttgtgttacagtaattaattcagttaaatggatacttttattttctccaaagttccttcaactttagagagaccaaagtaattacataagtgaaatatctggaagagtaaagaataaataataaaaaatgcttcaggaaaggaatattttactagagtatttaccatgtctttaatttgtagttatcgaacatgaaaatacatgggaaagacttggagacctttcataagagaccaaatataaaagtaatggaaaatataatatgtaaagaaaaagtagaattgataataccttgcctgaaaggcctagacagatttaataactatcccagaacatgtaaatcgttatgcttattagaatggttccaggcattttacaggggaagcaacagaataaaagagctgtatggtcttaaagaatgagaaaaaacatcccctgcctctcccctgtaactgtatcatttgatttgaatttttttattgcttctagaattcttcatagaacagtatctggaaaagaatagtactatagataagaaaacatatattacggtggtaattttttaactacctgtgtgacattttattggtctgaattttacgtgcctcatttgaaaagggataaagctgaactataacaatttcttttgatctttttgagtcatggacattttgaaaatttgattaaagttatatcttctctctataaaaatgacttgcactttgtattttacttttaatttcaggaatacaatgacaccctgtagctcattcatgagtatgtcctagaggttcctgctagttaaataattttagattcagagtctaaaattgcatacaattctaacatttcctggtctgctatattatcactatttggatgtttagatatatttttgctagtatctcttttttctagtaataacacaagcaaaacttccctgttaaataattaagcattgatcaattttctaataatttcactggaataagagtgaagaaattcagtctacttttacattgactccttaagtgtctggcactgactttaacataaaacaacacacagtaatatatttgaaaaaatctgttgctgaaacattcatgatagtttatcttgattaaaagactcactgtattatgtgtaattttaatcattatatctttctctattaatttttccatatcccttttaaaatgagagcactgaataaaatgtctcccttcaactgtaagttttatgataaattgaacttaaaatttcagaatccctctcatgtacacatttaatcaatgtagtctggatcttatttattcagtttaacccctcatttttaaaaaaatgttcactctcctattttcaatgacatcatgttattatatacttattacataatcggtttattttattcctttagagctacttatcctccttttgtttcccaatttgacgcattccaagagctccgtttttgagtattgcttcttttggcctttttctttcccttagagattttattcattctcatttttgttccaacgttctacatttattttgtcagccttgtttttgtgctttacttctagaactaagaactcagtaaactgccaaaataaataatcaaatatccctgtggcttaacacagcaaacgtatatgttttgctcttcctacatccaatgtaaatttgctaaacatgcaactctctaggacggcgctttttaaagaactgagatacaggatataggtattccattaagtggttccaacatccttcaaaaatatggagctctccacagactcatttccacctttccagccttcaagaggaaagagggaaaaagaaaatttaggtaatagaccaggaagagagatgcctcatctctgcccatattttatcagccaaaacttgatcccatggtttcatctttctacaagatggtggttgtaggccagaaaagaatagtttagctttgtgtataggattgaaaaaatgacttggtgagcactttggagactctgcattgcagtgcttcatcatcctttaattaaatcatttccttcccatattggttgtctctgaattagtgcacctcttttattattttaatatgttctcagcaactggccttctccatccattctgcattatggccaaacacttcctttggcttctctctgtttgtttcatacacactagtctccctggataattccaaactggaaatatagaggagctccttgactgaaagacctgtacctcaatgactgaagtcctctgtagtactgagcacatgtatgtgctcttccattacactttcattttcttcagtttcaatcagccttctgggtttatcaaaggccttggtgaaggaccatttgatacctttgcctaaatcttagaagggaaatgtgccttgataaaagaagggtcaaaatgaagaagaacattgtattatggaaattagggctaatcttaatcactggatcctttaaagtacagaaataccttcttacaaggtaatcaaaggtaactaataaatagagatagctctgttcctcagttctgcattttagcaacaaccatgctgaacaagatggttttaatgttcttttcagcttgactaaatcttggacagacttctttctgattctaagaccctaaactctcatttcttaaagcatatagttttgacaacatgtaattgcaagttcttcctctgcttctttgagatttcaagctgtttcaaaaggactgtctttttcaaggacctgggagccttccctttgaaatgtaatcattaaggaagatagagcccccatctcccagtctctatctgagcacagaagcctaaatctaagttgtaaattttccttcagtcataaaaagagagtttacattctgcaaataataagccattattctaagtgaatcaacgcagtaacagaaagccagatacagcatgttcttacatataagtgggagctaaacaccaaatacatgtggacataaagatggaaccctacagactactagagggaggaaggaggaagagaggaatgggctgaaaaattacctgtggggtactatgctcacccgctgggtgatgagatcatcaatactaaaacccagcatcacacaatatacccatctagcaaacctgcacgtgtacctgctgaatctaaaataaaagttgaaattatatttcctttgaatgaggctaatttgaaaacacacacggcttataatctaccaccccagctcttcaaaactctccaggcttttgctgcagcagagttcagtccatactgccttttgttttatcttccctgttgcaatagtcttgaataaaatcttccttagcgtttttattttgtcaggtttaatttttccttgagactatctggggactttcctaattcttggtgcttcagacttcctgaattcagttcagactgccttttgttttctttcctgttgcaatagtcttttgcaacaagaaagataaatcttccttatctttctaactatgtaccttttaatttccctcgacactacttggggactttcctaattctttgcccttcagacttcctgattatatactctgctcctgcctctgcagaaatagtcttttcttattttttttacctttccagaaacagaacttaagttctcccaccttgtttgcctcctctttctgtggcccttgtctttgtaagactctgaccaatggcttcattaactttaacttcatatattttctattttggactaagtgtccttcctggcctgctgcttccacaggtgatggattaggtgcgtgggttcagcttccttattgtaagatcttttctttcctttcccacatttgtagacacacttgttgcaaatattcttctacttagcacatttatcttacctgttttgtcctattttctttagattcctgagcctttacttaatattttcctgaattaaaaatggaaatgtgcgtatcaactatcagagatgctggaacataaaaagtaataaagtgaagctatttgtgggctattacttcactgagttggattcttctcttattcccactgagtatttcagtggatttctgaactgaagaataaactaatccataattcatatgaactaatgaataaactcattcataattcataacctaataaactaattcataattcccatgatacattgcaacaagaagaattcctttcatcttttaactttttgtgttaccgcatttactacaggttttccatctccagacatgcttactttacaagttgcaatttttgaatgcaggcagaataagatatattgatgaggggaaaaaagagggagcgagatatcaagatggactacaaaaagtattatatcctccctacaaaataagtatctctgttgtggaagaataagtacacagttttaaggtagactttgagtctttaagacaagtactaaaatttatgttttttttttattcagtcctgctgatggtcaggttttctcagaaaacataatgatgtaatgtatcaatccagatccattgatcaagctgaactctttcatgattattttttgttatgaaaaaaatgaattattctgcacagagagagaatattataacaatcttccaaatatacatcattcaaatgataaacagtcttctaaacttgtttgatatctttttaataccttctttgtttcctcacatgtttttttcttttggtgataaaatgtctcaaaaatatctcagactttatggccttccacttttcatatgtaaatgtaatgtcatcatcatgcatagctaaaaatgtataataattccttaatatccaatctatacagtaaacttttgatagaatttaagttttttcagaggttggtgcaaggtgatttaaatcgagatgtttagagttctaatgagggcaatgtctgttttgtttgacagccggggtgaatcattttttagcatcctccttgtctataggacaacattattttctgggctattaataagatgaaataagtgtgaattatggcaaaaaatttgcagggtgagaattttatgtttctgaatttcatatatgtagaattatgaaagaaaaattcaaaaaaatataaaatctgaaaggaaaataatggatagtttttaattgcaatatctttttaaaaaggaaaaatatatgatgtacggatttgttatatttataaatattacattttttttcagccttaacttatgtgaatttatcaatcactttatcaaagttgatcttcttcatgtcctatagctattataaccagattcatccttcttctttctctccttgttggtgaaagaatacttattattaattttagttttgaaaatgttctattacacgaagaaacaaggaacacaaattattaacaaaagtcttcaatataaagatgagttttgcagaagtttataaatatcctatttgaaatacatattataatgttgttttctttcttgctcttacaaaatttcccataaaacatcttcaacagaaaatacaccatgaattttaatgatatttattaaaatattgttacttttttgtcttttataaaaattgtagaaacagctgaataataacaaatattggcattattaattcatcaatttagaatgagtatccatttattaaagagaacaatctaggcaataaaccatcccacttttaaaaatctttgactatataagatgagcacctttttcagttctcttggtcttcttcttagcaacttgattctacttttctttggaaggatccattcccttaatgttgtggctgcacaatgtcctactccacagtttccatgtactaattttcaaagattgatttcagcttagtggtccactgtatatttttttcaagactaattctggctacttgcaaatatatttggcttctcattaacctcatttaaatctttacattaggggaaaaagataactcataaaagaaaaattgcatacagttcttgcacacagaattatgcaattattttggggttaaagatacaagatgaatttaaggaaggtcaaacaattatgaattcttacaaatttcctctcaagatgaaaatgtgtaggtgaatctccttgcattcggggttgactatataactagggattctttgaattaaatttcccatagaatataatgttgattaaatgataagtaatacaaacttccaagttgtaactgacagatgtattattaaaacaacattaatcacagcaattgtttataacttaggctaacaaatatatcttctgatatgttttagcattgtcagctagtatgaaaataagaaacagacatttagtcagtttcattattgttttaaatttctccacataaaatatacccccttattgcctatacccagagtagactactagtattctactacctcctactaatctactcttggcatacaatcggatgagggtccataagccttcccttggttttactgtgagaaactaggaaagactgaattaggacggctagtgggtgtctcatcagctcttgtaaaacttcctgttgctgtcttgaatctctcctgcattaagtccacttcttacactgaacctagactttgaaaaacacaaatctgttcacaaatcttctagtcacttccctctgcctggagcaaaaagttttgaactccttagcacagtatctcccctgacttctcaactccttacactaaatctccacttactccctcccctaccaagcacaatccttccgtctgccagaacccaccaagttcattcatatcgatgagtctttgcatgggctgctggctttcatttactaagaaacttcctaattttgtggcagggctaagaaaattatttttcaaatttaagactcagaaaagactcctatttgaggaaattcttgattcatatcacatagaatacttttatctgggtccacaaatttagaatcatttcctattctgctttaaatctttagtatgaagaatatgtataccacatgtgcaagaaatgctttttgtttcaaaaaatatgaaatgggattctgttcaagcaaaacacatttagattttttgagggtattcttttttttttattatacttgaagttttagggtacatgtggacaatgtgcaggtttgttacatatgtatacatgtgccatgttggtgtgctgcacctattaactggtcatttaacattaggtatatctcctaatgctatccctccccccaccccacaacaggccccatggaatactatgcagccataaaaaatgatgagttcatgtcctttgcagggacatggatgaagctggaaaccatcactctcagcaaactatcgcaaggacaaaaaaccaaacaccgcatgttctcactcataggtgggatttgaacaatgagaacacatggacacaggaaggggaacatcaaacacatttagatttgtataaaaactttcagaggttatttcaacatgaaaatcagtaacatcaaaaatgactttagaaatgttttaaatatataagactcacctactatcttgaaaagcttatttgctatattctggctgtgctaaataacagtattccttccaattttctgtatctccctatatttttattcatttttattgcctgtttcttatcattttctatgtatctgtgtttacaggtatataaataatgagttcctagaaaggagaaatattccttttctttttgagtaaaataataaaatatttagagatgacgtgatctaacctatgagatttgctttaaaataatatgctagagcataagtggatgagggtataaatgaaacaagattaattttgtgttgacatttatcaaagctgtgtgagagatccgtggggatccattatataattttgcacatgattaaaatttttcataatacaaagtttttttaaaaaaataaaatgggtgtatatgtgtggatgtatgcatgcatacatcacaaattatgggaaatttacataatataaaggtaatacacacacacatacacatacgaagagagagagaaaaaaagagagaaagaaagtgcacaagtgcagttttgtgcctagaattatgctcatgactgcaaaattcatcatggctagtacagtgtcaatgaacaaaatcttagaaatcttcaaaaatggagatatatacatcttcactactattttacttttgtcctcaaaacctgtatgtttaactaaatccaggtttagaaaaagagcttagtcctaagtagggtggaattgatacaatgtgaatgagtatataacttaatctacattcagtataaagtattttaaagacccctaatgtgcacagtgtacttttgctatgtgctgagttcatagttgatgtcacaagatgataggctggaaacccaaggagttcacagaatggtggcactgaaggcatttgcagtcctcctgtcgctttctccagaaaatattttcagcatttgctagtccaaccttgtgtgtatctccatcattgtagtgtcctcattgtgttagagttgtattatgagtttggtacaaaagtagttgtggtttttgccattgaaagtaatggaaaaacctcaagtacttttgcaacaacctaatgtaattaaatagttcaccagaacgtaaagtccttgaagatagggataataaattacatcatttccacctttgttgccaagagtctagtgcatagtatatttgcaccaagatgattgaatctatctatctatctatctatctatctatctatctatctatctatatgcacacacacatatgtatagatacatacacatatacatatatatacatatatctatataagtatatatagatatgatgtaccttaattttttaccttacactttagagattagaaagaatatgttcaattgcctacaccttctgtgatttaaaaattcaaaattttatcacctataaactagttataaattttattgtaacagcaattattatactttcttaagtataacatttaattgttaattacagaatatagaaattacaggaaagagcataataaggtactcaaaagtcaaaaaggatatatattataccaacttgtgtatatatataagtttatgcaacagggagaaatatatgtatatatgtatatttctcctttatgcaacagggagaaatatgtgtgtgtatatatatacacatatatatgtaaatatatttctccctgttgcataaactgtttgcttttttctaaaagctcctaacacatgagattttaacctgtagataaaacatgtttcatgtttcattttgatattgagctgatatttaatgtttactttcaatgttttgagtgtaaactcttaagtacaatatactacttctttattttcagcaaatcaactattacaattattcgttgaatttaaaaaatcatgttttctatgtatcttgtagttttaaatactttataaatcatgggctttcctgataatttgttaaaaactcttaatctttttctcatcggttaagagaaatgaacatagatacaatatttagtgtgcattgtcatgatattcacacacatactgcaattcattaattgaaagtctttggaaatgaaggtaaggaaagaacttaagttcctaaaccaaaacatcttcaacttaactctaggtaaatagtattaactaaattatttctttattaccactttattatttcaacgatacaggtaacagtattaaatagtattcaacaattcttaatttattctgaatgtacaccataacaggtatcattatgtagtgtttcctatattctgatagctattgaattattattttattatacattcttgtaagtatacgtgtagacatgaaaataaacatgcacgacctatatgacatgctatgttcagtgatgacagctgtcttcccatttttttgatgtgttaaatgcaagaggtttatttctttttaaaaagttgttgtgggtacatagtagacatatatacttatggagttcatgagatattttgatacaggaatggaattcataataatcacgttatgaaagatgggttatccatcttgtcaatatctattctttgtgttacacacaattcagttatactgttttagttattttgaaatgtacaattaaatttttactgactataggcaccctattgtgctatcaaacactaggccatattcattcatttggactattttttgtacctgttactaagcctttttccaactccccactacctttctcagcctctggtagccatccttctactctctatctgcatgtgttcagttgtttggatttttagatcccataaatacataagaacatatgacgtttgtctttttgtgccaggcttatattacttaacataatgacctacaattccttctatggtgttggaaatgacaaggcctcattcttttatatgactgaatagcacatcatgtctatacataccacagtttctttttctatttttttttgtttgtttgtttgttttgctgagatggagtcttgctctgttccactagctggagtgcaatggcacaatctttgctcactgcggactccgtctctgggttcaagcaattatccctgcctcagcctcctgagtagctgggattacaggtgcccaccaccacgcctggctaatttttgtattttttagtagaaacagggttttgccatgttagccaggctggtcttgaactcctgtcctcaggtgatccaccttcattggcctcccaaatgctgggattataggtgtgagccactgtgcccgcccatgtaccacagttttttttttttttcccttcatctgttgatggacactgaggcagcttccaagatttggcttttgtaaacaaagctgcaacaagcatggggttggacatatctcttgcatatgttggtctcctttcttttgggtattgtattcaattgggtactgacttacagtcccatgtggctggggaggcctcacaatcatggtggaaggcaaggaggagcaagtcacgtcttacatgaatggtggcaggcaaagagagagagcttgttcagaggaactcctttgtataaaaccatcagatcttgtgagacttattcagaatgctgagacccacacaagaaagactcacccctgtgattcaattacctccgactgagtcccacccatgacgtgggaattgtgggagttacaattcatcaagagatttgggtgggggcatagccaaaccatatcattctgctcctcatctctctcaaatctcatgtccccacatttcaaaaccaatcatgccttcccaacagtctggcaaagtcttcactcacttcagcattaacccaaaagtccacagtccaaagtcttatctgagacaaggcatgtcccttccacatatgagcctgtgaaatcaaaagcaagctagttacttcctagatacaattggggtacaggtattgggtaaatacagcgattccaaatgcgagaaattggccaaaacaaaagggctacagggtccatgcaactccaaaatccagctgggtagtcaaatcttaaaggtccaaaataatctcctttgactccatgtctcacatcaaggtcatgctgatgcaagaggtgggttcctatagtattgggcagcactgactctgtgacttttcagggtacagcttcccacctgggtgttttcatgggctggtattgagtgtctgtggcttttccaggcacacagtgcaagctgtcagtggatctatcattctggggtctggaggacagtggccttctctcacagctccactaggcagtgccccagtggggactctatgtgggagcttcaaccctgcatttcccttccacactgccctagaagaggttctccatgaaggactcacccctgcagcaaacttcttcctgggcatccaggcatttccatatatcctctgaaatctaagtgggggttcccaaacatcaattcttgacttctgtacacctgcaggttcaacaccatgtggaagctgccaagacttgaggcttgcaccctctgaagccacggcctgagctttactttggccccgtttagtcacggctggagtggctgggactcatgccaccaagttcctaggctgcacacagcactgggacactgggccagcccagaaaaccatatttttgtcctaggcctctggacctgtgatgagaagggctgcagtaaagacctctctgacatgccctggagacattttccccattgtcttggggattgtcattgcagccagcttaaatttctccttagaaaatgggattttcttttctatcgcattgtccagctgcaaattttctgaactgttatgctctgcttcccttataaaactgaatgctttaacagcactgaagtcacctcttgaaagctttgctgcttagaaatttcttctgccagatatcctaaatcattctctcaagttcaaagtttcacaaatctctggggcaggggcaaaatgctgccagactctttgctaaaacataacaagagtcacctttgatacagttcctaacaagtttttcatctctatctgagaccaccacagatttaatcttattgttcatatcatgatcaacatttttgtcaaagccattcaacaagtctctaggaagttccaaactttcccacgttttccggtcttcttctgtgtcctccaaactgttccaatctctgcctgttacccagttccaaagtcacttacacattttgggtgccccactctactggtaccaatttactgtattagtcagttttcatgctgctgataaagacataccagagactgggaagaaaaaaaggtttaatggacttacagttccacgtggctggggagacctcacaatcaggtggaaggcaaggaggagcaagtcacgtcttacatggatggcggcaggcaaagagagagaacttgtgcaggggaactcctctttacaaaaccatcagatctcatgagacttattcactatcacaagaacagcatgagaaagaccttcccccatcattcaattacctccatctgggtccctcccagacatgtggaaattgtgggagttacaattcaagatgagatttgggtggggacatagccaaactatatcaggtatataatcagcaggggattgctggatcatatggtagtggaacctccaaacatttctccatagtgattgcactaacttgcattcctaccaacaatgtacaagagggttctcttttatccacatccttgccagcattagttattgcctttttgataaaagccacttcaactgagatgatatctcattgtatttttttatttgaatttctctgatgatcaatgatgttaagcactttttcatatgtccatttaccaattggaagtcttctcttgagaaatgtccatgcaaatcttttgtccatcttttgagcagattattagactttttcctacagagttgtttgaattccttatatattctggttattaataccttgtcagatggtagtttgcaaatattttccctcttctgtgggttgtctcatcacgtcgtggattgtttctctgctgtgcagaaactttttaacttgatatgaccccatttgtccatatatgctttggttgcctgtgcttgtggggtgtttactcaagaaatattcgtgcagaccaatatacttgataatttttccaatgttttcttgtcatagtttcatagtttgagggcttagattcaattctctaatacatttttatttaatttttatagatggtgagatatagaggtctagtttcactcttctgcatatgaatttcccagttttcctcttttattgaagagactgtcttttccccagtgtatgttcttggcaccttcattgaaaatgagttcactgtatgtgggtcaatttgtttctgggttctctattctgttccgtgtgtgtgtgtgtgtgtgtgtgtgtgtgtctgtgtgtgtgtgtgttttatgccagtaccatcctgttttgttactgtaactctgtaatataatttgaagtgaggttatatgatttgtccagttttgttctttttgcttaggatagttttggctattgtggatcttttgtggtttcataacaattttaggtttttttttctatttttgtgaagaatgtcattgataattttatagggattgcattgaatccgtagattgtttttggtggtatagacattttaataatattgattatttcaatccctgaacataaaatacctttccattttttggtgtcctcctcaatttctttcatcagtgttttatacttttcattacagagatcattcttttctttgttgaaattaattcctagatatttattttatgtgtggctattgtaaatgggattatattttatttcgtttttacattgttcactgttggtatatagaaatgcttctgatttttgtatgttgattttgtatcttacaactttactgaacctgtttacaagttttaatagctttttagtggactctttggtttgcccaaacataagatcgtattaattgcaaacaaggataatttgaattctttcattttaatttggatgctctttatttctttctcatgtctgatttctctagctaggacttccagtactatgttgaataacagtggtgaaaatgggcattcttgtcagattttagaggaaaggcttttatgtttttcctcattcagtatgatactattctgtatgacagctgagggtctcatatatatggctttaattatgatgaggtatgtttcttctatactcagttttttgagggttttgataatgaagagatgttgaattttatcaatgctttttcaacatcagctgaaacgatcatgtggggttttttccttcattctgttgatatgatgtatcacattgattgatttgtgtattttgaaccatccttgcatgctagtgataaattccacttggtcgtgatgaatgattttttaatttattgttgaatttggtttgcttatattttgttaaggaattttggatctctatttatcagggatatttttgtctgtagtttcctttctttcttttttttaagtatgcctttgtctggttttggtatcaggataatatttgccttaaactgagtttggaagtattcccttctcctatattttttgtaattgattgcataggctctgtattagttcttctttaaaagtttggtagaattcagcagtaaaaccactgggtcctgggctctttttttttttttttttttttgagatggactctcactctgtcatccaaactggagtactgtggcactgtctcagctcatgcagtctctgcctcccaggttcaaacaattctcctgcctcagcctcctgagtagctgggattacagggatgcacccccagtgcctggctaatgtttttgtatttttagtagacatggagtttcactatgttggtcaggctggtctcgaacttctaacctcaggtgatccacctgccttggcctcccaatgtgctgaggtcacaggcatgagccaccgcacccagccccaggcttttctttactgggagatttttattacgactttgatctcattacttgttattggtcctttcaggttttgaatttctttctggttcaactggttcaatcttgataggttatacatgtctaagaatgtgtccatttcttctagatttttcaatttactggtatatagttgctcatagttgctattaatgatactttcaatgtctgtggtatcaggcataatgtctccttttttatctttgattttttttttatttggataatctcttttccttagcctggctaaaaatttgtctattttgtttaacttctcaaaaaccacctttttgtttcattgatcttttgtattgttttcttcatttcaaattcatttatttctgctttgaaatttattatttcttttcttctactaatgttgggtttggtttgctcttgcttatctagttcttttacatgcatcattaagttgtttatttgaagtttttcttcttttttgatgtaagcacttatagctataaacttctttcttattacttcatttgctgtatcccataggatttggtaggttgtgtttccattatcatttatttcaagaaatttttcaatttccttcttaatttatttactgactcactggtcattcagcagcatactgtttaatttccatgtatttgtatagtttccaaaattcctcttgtaattgatttctgcttttattccattgtgtttatagaagatgcttgatattttttcaatctttttgaatgttttaaggcttgtttttttgaactaacatatggtctatcctcgagaatgatccatgtaaatgtttattagattcatttggtctataatgcagattaagtccaatgtttctttgttggttttttgtctggaagatctgtccattgctgaaagtggggtgttgaagtatctagctattattgtattggggcctatctctctctttaactctaataatatatttttttatatatgtgggtgctccagtgtttggtgcatatatacttaaaattgttatatcctcttgataaattgaacactttattattacataatatccttctttgctccttcttagagtttttgtcttgaaatctattctttttctgataagactagttactcttgctcttttttggtttccattggcatggaatatctttctccatccctttattttcagtatatgtgtgtttccctctttctccgctctaagccacctggagctgggggtgaattgacacaagaaccctgtggccaccacccctaagtgtgtactgggtcacacctgaagtctgtacagcactggatcttacccaaggtctgctgtaaccactcccttgtaccacctatgttcgctcaaagcgctgggtctctagaataagcgttgtagccatccagacctatgtcctttccttcagagcagtgatttctttcccctggcccctgggaaggtccagaggttcagttagggagccagatactagagtcaaagaccttagaaatcgtccttgggttctattgtgctgcggctgaattggcactcaaaccacaagacatagtccttcccactcttccctcccctttccacaggcagaggagtctcagtaggtcacatgccaccccaatccactatctctaggcccagctgagccctaggacatgacttgcctgggtgtggcaattcttgtggcctagactccctttcaggtttatttggagccacagaccactttagcctgcagtggagagccttacgacaactcaaactctgacctctgggatcagtcattctcctctggctagggctggtttaaatgcaccctcagtggacaggcatcaactgagtttaatctagttttgctttcttctataaaggagggcagcatggagttcaatggctcaaaattgctgggtctccctctcagggcacaaaatctctctctaaagaaagctgctgctgctggtgggtggggaaagggtggtgtcagtgattcaagtctcctttttctacttcttcagtgcctctttcagtgatacaaagtaaaagccaaggattatgaatggtcacctgattttttggttcttatgaaggtgcttttttgtgtgtaaatagttgttaaattagtgtccttgcaggggatgataggtggagccttctattctgccatcttgcttcattctcaacctatcctcccatttaaaattattatggtcttcatttttggaaacagatgtgacaggaatcaacagatgttaacgggaaacaaggaattttcctgatgagacaatttggtcttagaactgttttagaaaccaagtaaagtgcaaagtttcgctagggccctcaaataaaaatgatgtaaaccaacagatgacagcttaatgagtttaggcaggaggatggggctatatagtatcaagatagatgatgttgaatctcatggatagattcggttactgactctacagatcaataatggcaatcatgatgatgatttactgttagggaaacatgttttggtggtatctcgggcttgtctgacaatgcatattcaaaagatagattgaatgccctggaatgttaaccttgtcactgatgattttagcattttcttgagatgcactaaaaaagactgtttttttttccttttaaaattattgggctgaataatcatatttagttatttcaattctagctgaagaatttggtatgtttcaaaatactacactaaagttaaattgcattttgttcaaaaggtctcatattaatttttattattttaaatgaaaactcacagtagcttggaaaataaagtggtttcacctctatttagtatactacaaacagtaaaagtgatattgaaggatattcatatagtaaaatcacaaaatgatatattgcattatattcagggaaagcatcaggattgtgcgaagttggacacccttgcatcttttaggaaacagccattgacatctttactgtaagaaataatgcacttttttttggagatggataaatagtaattaatcaaaattcaatttcaaggcatttgaaagtttctccgcctttctccaacataacaaacaaaaggattttcataactttactcctgcaagttgtcaattttttaactatttttgtatattgctacattttgcatattactatgttatataaaataatattgtaaataatttaaacaatttgaataccaaagttctttctatttgtcattaaaattaatttttcctgtgtctattgttctactcacagagtgatgcagagatgtgacccaacgggtctacctaccagggaggaggtgtggtttttactggaatattctggcaggcaaaagtgagtagcttagtttgaggcctggaacttctctataccaggaagtcatttcatttatctgtgccattgttttcttatcagcaaaatatgaactgggctatctaattgacagtttttccatgacaagcaagtgagctgagccaatatgagtaagggaaacaaatgcaaatctccaatgccatttcagtgatggatattaactttcaaatgaaatacaaaaatttacagcatttcctcaattcaatttgatatcattgaaacagtctttatttttcataatgaaatactcaatgatttattataatataatccttaattgtgtttcatgtctttgaaatgacaacaattttactctttcatgacaaaaatgtttattactttatatattagcaatatctaaaacctccccataattttcatttcatccaacccactctaccaccagatcaatgtaaggacccaggtttagaatgaatgtatctcctcttattcccttatttatgccattccatgacccaccaaacacacatttcattgattctacataccactttctttttcaactcctcttcaacattttgatggtttttctctcttccttactagatttaatggtatagttagtcacgacagtcattctcttgcttacattctcaaatctcctttgtctcttggtttcaaacattcattttgaaacacttgattaatttcaccccctgactatttcatgcctgtattgcatgtagctgaatgtgactgaaaagtagtgtgccagcaggtaattctaaggcatttgaattgaaccccttttctaatcttcttttattctctttttaaatattcccaaaacacctattgcttttaacatattacatcatttacctactacatctactatttaccaggatgcatgtccttacaaggctaggatctttgatgttttttccactgatatatctcaagtgcctgatatattaaacactcaaatatgtttgttggatatatgttgttcaatatttatgttcttatcttcagattgtctatatgatttagagtttccagaaaactgtttaactttgcatccactgacaatggaaagaccacatttatcttcctgtgcaaagggttatgtgtgttacagataaaatgttgattcatttttctatctcattcccattctctattctaggtgagtataatgctagtaaaaactctaacaaagtaattataatgtgttccggacaggatctctccttttggctttctccctgcttctgaaacacatccctttccaggaatgcatgctttctgaggcagacaaaagaagagttgttcaaggtatgtcaagatgaaatgtcagtttactgaattgcagtttctaccttttttcctataaaacacttctcaattaaatgcttagctttcagtgtcaataaatctgatattataattgctacaatcctaatacatttctaagtgcctctatatcatatttttttcttttcttttcttttttgttcttttgagacagagtatcactctgtcacccaggctggagtgcagtggcatggtctcggctcactgcaacctccatctcctgggtacaagtgattctcccacctcagcctcctcagtagctgggacaacaggcatgcatcaccttgccaaactatttttttgtatttttagtagaaactgagttacgctatgttggccagcatggtctcaaattcctggcctcaagtgatttgcccaagtcagcctcccaaagtgctgggattagaggcatgagccactgcacgtggctaaatgccactatatcattttcttactttaaaaaattgatttgggggacacataaaatccttggttattcacatagtgaggggacaattttgcttctatttcttactttacagataaggaaactgaggccgtgaaaaattaggaaatttgtacaaggtcacaaatataaagcactttttactttgaaatggttcttgagacttttctttttagaagcttcatataaacatttcacacacgcaggaaattataccttcatatctctttggggaaagaaaaaattacaatagaaaatatttctcattaagatagccttgattctatttgacactttaactgtactatctttatcgtgtataatagatggattatgtaattacattactctatagattctattagaataggcagacatttgaatttgggaaaccaatcaggcttaattagaagaacttagttgaaatagcctgaggaaatgaaaaatagaatttcttttacgttaagtcacagattacaaaattattatctacattgttaaggcttttttaaaaaaaattattttattcagattataatatacactactacattttaagccctatagcctgtcatagttttcttccttgttacctgatatggtaattctccttctttaatgcagttaataaaaaggtcgagattccctagttccttcctatgctcttctttattatgataccccatcacctgagactggaagctaaatgaacttcacctttcagattttttttcacctgagaatgtacatcatatggtaatgggccagcccactgtgtctgttggatctgtgaccgcagctgtgattattcatcttaatttgcttgtaaaagatgctaattatttcataaggcattcacttataaaatggaaaccaaagcaagcagaagcagggttttgttgacatgttttaaagtacagaaataattccaattgaaatgttaattaaaataatatatcatgtcttttaaaaactcagatgttccaggtttatttgagatggtcttcagtccttggaaaaatatgtatagctccatcaaatttggtttcttattatatcaaagaaaggaacatagtcaatgaaacttaagctcagatacgtgtgtgacatacgtacaatgtcagatctagaaaagtccatatttaaaatatatatatagctactttggaatatataaagaaaaagctctatgctttaatagataacatctagtgagcactgactatatcttatgttaataactcattttcttatcaaatcatctatgttaggaaattgagactttaactttttgaaaatattatgatatggctaaagtctgtaaccagaaagtctgaatccagaacccattgcttaattgcttgtgttacttgccttttgactagaagctttattgattctgatattgcaaaactcgatattcattttcagattgtgaagatgtctatttttctcaaagtcttttatctgagtttcacatgcttaagacagtttcagaaataaaatgatgttttgtttcagagtgtttttaaatgtatatatttattcctaactgacattaacaaataattgtattggtaatgtcttgtgattagtggcactgttgaacaatgtttggactatttttttaccagggatgcataaaatacttagaatttaattaaatgaaatgaaaaaaatatttttcttagtgtataatgcctaaaagtttattattgtccagaaattttgtaaaaaatgtattttaaaatattaaccatttagtaatcttcatagattaattaacctaatggtttaagaaagtgcatagttgcttaactactttaaaggttacttcagacacaggctagttcagaataagtttatgaattaattctctttctaaaacataaagtcctgggaagtaagccaaggtcagtttcttgaagctaaccaagtaggctaataataagaactcttacattagccaaactgaattattcagatgtaaccagtagtgtctaaaatttccaaatttcttggaacaacatcaatgtgatattatgctctaatgtctggctaacttctggaaagatttactacatatccatactctttggttattgcattcttaacaaatgaatagcatttctgataggacaagatattggtccatcctgaaggagagaagaggattattgctaccacatgaaaacaaagagaaatagatgggtaattttcagtgggttcgttgcattatgtaaacctatttgagcacttattcttattacaccttaaatgtatttatttttaaagcacataagaatcaaattccttctccctaatctttgtgattctcatgaagtacttctgagatgtgaatcaggactttgcattcttagcaagcatccaggtgattctgtcgcagatgagtcacacattgtatttttagaaatactgagagtagctgtgttttccaatacacataactgtaagttttcagcaagacttggtagtgggagacatttagttaaaatgggtaatgtgttaagggataagcctgccctaatatttggagtggctgaattggttaacagtattctatcagggaaaatttctttacttgaccttcattttcacctttgatatgtacatacaggttaagagtaagaatggtgatttgaatccaattaatgtgcatttgcaaagatttagatgataagaagagaatgtaccttgaccttggactagagaaggaacggaaatgttatagaaaaaatgaaagggttatacaaggaaacttaatcctaagcagagctttacccatgggactaagcctggaagggaataactgaaactgagactcagaggaaattgaagcttgtagcagatttgtgcccaggataatggcatgattctaaagattctgcttgcacaaacagagtaagtaaaacctgggcactttggctcacgcctgtaatcccagcactctgggaggctgaggtgggcagatcaagaggtcaagagatcgagaccatcctggccaacatggtgaaaccccatctctacgaaaaacacaaaaattagctgggcgtggtggtatgcacctgtagtctcagctactcgggaggctgaggcaggagaatcatttgaacccgggaggcggaggttgcagtgagccaagagtaagtaaaacctgggcactttggctcacacctgtaatcccagcactttgggaggctgaggtgggcagatcaagaggtcaagagatcgagaccatcctggccaacatggtgaaaccccatctctactaaaaacacaaaaattagctgggcgtggtggtatgcacctgtagtctcagctactcaggaggctgaggcaggagaatcatttgaacccgggagacagaggttgcagtgagccaagattacaccactgcacttcagcctgatgacagaacgagactccgtctaaaaaacaaaacaaaaaaaaggccgggcccagtggctgacgcttgtaatcgcagccctttgggaggccgagacgggtggatcacgaggtcaggagatcgagaccatcctggctaacacgatgaaacccctctctactaaaaatacaaaaaattagctgggcgtggtggcaggcacctgtagtcccagctactcgggaggctgaggcaggagaaaggcgtgaaaccgggaggctgagcttgcagtgagccgagatcgcgccactgcgccccagcctgggcgacagagcaagactctgtctcaaaaaataaaaaagagtgtataaaaggaggtgaaaaattagtgggtttaaaaaaattttttttcttaacagtctatctcaaatgtcatttattccaagacctaaaggaaaaaaaagaggagcaagatatacaaaaatcagaacagatcattccaaacagctgtaataaggtaatagacagtacaatgacccatagagaaagtgagaaaaaaaatcaagatgcttaaacatcctgagagaagcaaggaaaatagtagaagaggttaggtaatcaggcaagtatcaaatgatacaggactttttttttttttttttttttagaaaaagtaagtagtttgaattttattctaagtgtgagtaattcttttggaaaattataagtaggggtgcttataactccagatctctgtggcatccaaatgtaaaattttttcttgctcaattacttgtcagctgaagttcgactataattatgccacctgtcttctttagttttgaatgcaggttgcagaaatgcttccctctgagataagacattctcatggaaaaggagaaaagaaaaagaaaatagaattgcaaaagcacaagatggtttaaaacttctacttagatgatttaaacatggcatatatcatgtctgatcaccctccattggttaaagcaagtcctgataatccagatgttttgggagggccatcatcttcttacaggaagggtcagtgaataattggggacaatattttcttctgtatcaaaaacacccacaacatcattgaatttgaagctatatagacaagtgaataaataaattaaaaagctgaatggagatagaaaaaaagaggaaaatccagaaaaagaccaaagagctcctctgtgtttagaggcaaagtggtggagaaggagttcgcaaagatgattgaggagtaaaatccagtatagtagcaagaaaaaccaaaaaaatatctgccatggagaaaaagaaaatgtttccagaaaaagaagattaaccatgtggaatgcagctgagaaataaaataaggtaaaagacatgaaacaattagatttgtatttggcaacattgtatttgaaatggcaacaatacgtttaccgtgttggtattattttttttccaccagcaaatattgtgtactgggtaaggagatgtaggataaaggaaaatgatctcaaagaagatgggggtgagttagggagtagatggtagataaaaacaacccagagaatcaatgatggtggcgatagtcacgcatattattgaatatatggtttaggctgtggtgaaagtaaagtgagatttcaggggataaaatattccaggaaataataaaagttaagggatgggaagggtttcagtttcttatataaagttaaagccccaatattaagcaggcagcccacatgagtttgatattaatcagaatagtgacaacagttgaagtgagaaagtctttaaagtagatctgtaagttcctggtgaatgaagaggtagtaccacaaggttggcaactaaagatgttgtgtagtgtgtgcacatatgtgtgtttatgagtaatcatgccattattctatatcacagaatgtttacatattaaatataatgaggtaccttggcagttataactggtttatatgtttcatttgttgagaaatgttgaaggtacaattcagaatgctggaaatatttataacggcaatccctctacatcttaaagttagatggtatgaactttcccaattcattaagtgatgttcagtaaaattttgcactgctttttaatggcaatttgcatcataaaggaaagaataggagtacgttaattggctcaagaattattttcttaagtaactgcactcatttgcattttggagtgaggctccaaaactgaactcaagctctctatgtcctaggtgaccttgttagaatgcatggttataattatactgaataatcaatggaaaaacaggaaacttcaaaggctaatgaatagaatgctctatagtatttaaggttttaaaaaaatgactagcttttcatttattttctttgtgctttttgcaaaactaattctcacatttcacctgcatgaactctaactggggcgtatgatattctgttgatcatataggctccttccattaataactctattgctcacaaatttatagatttccattttcacccaccacttatcactatttattttttaaataacttttatgtgatgcaaattgcttttatgcttcatcaagactgaaatcctaaataaaacagtattttgtgattttatgttagaacacttcattgtctttgatcatatcctctgccctaatctaatttattactaccatctaatctaatctactactaatctaacattaaaaacaaaaaagtacgaattatcatttttcctttacacttaaaaatccctttggattaactataatatttgtcctatttttaaaaagtgcttgctcaaaaatatagttcagaaaattatggtcttaataatttattaaacaaattatctctaacaaccagataggaagaataagttctattgctgtataccattgcaggatgactatagttaacaaaaatatattatatagttttaagatagctagaaggaggatattgaatatccctaacacaaataaatgataaaagtttaagctgatagatatgtaagttaatccttatcttctcactatacattatgcgtattgaaacatcactaataccccagaaatatgtacaattattatttgccaataaaagaagataaacaaaaactaacacatgcttaaaattaaaaaaaaaaaaaacatactcttcaaagataatagttcattcaaattcttcagaatatacctttcattgctatcaaaacaatagatttaaaggacacttgttggaattcaggctgtttactgaatataagtactttcttttttttcttttttttttttttgttgagacagagttttgctcttgtcgcccaggctagagtacaatggctcagtctcggctcactgcaacctccgcctcccaggttccagcgattctcctgcctcagcttcccaagtagctgggatcacaggtgtgcgccaccacgcctggctaatttttgtatatttagtagagatggtatttcaccatttggccagactggtctcgaactcatgacctcaggtgatccacccgtcttgtcctcccaaagtgctgggattacaggcctgagccaccacacctggctgaatataagtactttcttaacagatctgagtagtttttaaatctgtgcatgtggatgatagtaggaaacaaataataaaatgttttagtgaataatgtagaaaaatctaaatccacagaacacttggtaaatagccctgttaatataaaaatttaggggaaaaaactggaaagaataaaaagaacatctatttactagatcacaagtatcatgtgaaaacccagtagctaaattaccagactttaagctgtgattttaggggatttggtttccggcattctcttggttcctcaggcccaccaagtttctggcaccctgggccctgcttttgtagccattgcgacttgtgtttccgccccctctctccacctttcttgaagtggtcatctatttaaaatgaacttaccgagtgcctaactttttccaagcaattgtgctaagcacagtgttaggatttgctaactcccgtgaggcatcatttctttgagaatgtgttttcttcaattgcctggacatgggcagcttctcctccccttacagtcagaaatcatggagaaaagcctttaaacttcctgcgatgatagataaccacagagcactggacttgagaacacagattttgaaaatagaaaactctgcgactgaatcttcatgtacttttgtaatgtgtcaatgtagctacactgaaatacgttttttattatttccttttctgtatgtttctggctaattggatcacagaagagactgttgggagagattcagagggtgaaagtgaaggggcagccattctgtagctctccactgtgtcactcacttgcttgtttccttactttgaggcagtggccaagcctgcaaatgtcccaccttctttttgttcctcttttggcttcataaactcctatgtcagttgtgtgtgttaggtctggcttatgcagaacacccataccaatgaggttcagaggcagtaacaactgacctagcgtttagcctgttctcatttgctacagcttgcgcttttgggtttcacttactgcttgctctcacccacctaacacctatccctccttccctgctgcccgtgtcctgtgtacttcaagatccaacatcaaatacaaagacaaaagatttacagatactacttaaccagtttgcgtatggtcaagcctctgaaaatactgcatgaggtcaaatctctattgatttatctatttctggttctctgaacactgagtgatatgcttgatatcaccaatgactagctaagtgatttggaagtaataagtgatttatcttcattaaatctgttttatttactacaaaatgggagttttgtgtgaaataaaaattaatgtaggtgctgcacttagcaagagatcaaacatgttataaacactcaatcaatagtaacaattatcattactctgtcctaaaaactatcgtgtttttattctctttttgctattggactaaatacaaaacaaaatacaacaatagaaaaaaataaacaaccaacaaatacacaaagaaattactactattccccaatggcaacttaatcttattattattatatccttccaagagcctgcaaaacaagaaagctaaaaaaatctgttagattcagtatttatctcaagctcattacacataaacaaattgtccctaataatcaatatgggaagcatgcttctatagaaaacatttgaattatttaaatagcattggtttttgcctatgtgattcttgttgtaagaacattccttgcattagtttgaaaataggaacatctagaaaatctactagatgatatttagtgcttttttagtatttcttagtttctcaagtcatgtaaaaaaccatgttttcatgtttttaacatgggataaagttgacttggctccagagaccaattaattacatgggaaaagatagaaaaactaaaaattgtgaaaatgaaaaattattcttacattactatgtataaaaaaattcatacttaggcatataggacctgtacaatggagaaaatcattagttgcctaaaatagttatatgtccatatctttctgtggctctgatttattagatataaaatggtgtatttattaaaatatccttggaagtgtcaaaatattaaaaaaattataataaatgtgatatatactgaatataatttaataaaatttataaatttattaacctgtatattgtatgtataaaacagatatatacagagagagaaagaaagagctacagagaaagaaataagaacactcaaacatagctgatagaaatgtaaattggtatagcttttaaaaagttaaggaagaaaatgtttcagtatatattaaaacaaatgtgtatttacatttgaattaagcaatttcattttttggagtttaaagacacatttccaacaatatgaaaatgcacctgcaacaggttgttcattgtttttaatagcaagatgtttggtgaagatgcatgcataaacataagagattgactgaatacactattagaattacacactgaaatctatgtttctgatttaagaaaactttgggaggccgaggcaggtggatcacaaggtcaggagattgagaccatcctggctaatacagtgaaaccccctctctgccaaaaatacaaaaaattacccatggtggcaggcacctgtagtcccagctactcgggaggctgaggcaggagaatggtgtgaacccgggaggggagagcttgcagtgagccgagatcgcgccactgcactccagcctgggcgacaaagagagactctgtctccaaaaaaaaagaagaaaacaaaaactgagggagatctgttttgccaatagtggagaaacaggaatacaatgttaagtggaaaaaaaaccttatagagtatatatagtgtgctatcatatgtgtaaaagaaagaggagtaataggaaatatacatatatttgcttatttttgcaaaacaaaagccaggaatgatacatctaaaactaatgatattgcccatattagtgggttgaatagtgtcccccaaaattcatgtctactgtaaacctatgaatgtcatcttatttgaaaataaggtctttgtacatacggtcacgttaagatgaagtcatattggattagagtaggccttaagtccttatttttgctataactttttagagtagtatagagtagtagcagagtagtagagtagaggttcttttatttttgtgtgtttactttttttttaggagaagaagacttagagacacagacacacagagggaagaaggccatagaaagacaaaggcaaagattggagttgtactgccacaagcccaagaatgaggaaaccaccaggagctagaagaaacaagcaaggattcgtccctggattggtctttcaaagggagcatggccctgctgacactttaatttcagacttctaggctgcagaaccattaaagaataaatttcctttgtttcaagccatgctgcttctgttgttttcttatggcagtcttgggaaactaatatatctattcatacatagaaatggaaatggggagaaacggtgttaaagaaagagtgagcttctcagactcccctttttggtataggttttacttttggacccatgttaatattttacataattaataaaataaaattaagaagtttgagggaaacatctttaaaatgaaaaacaaaccaacaaacaaatgaacctaacagtatttccattcaacgtattggaaaaatgcaaccaaactgaaggttggagcaaagaaggaatccaaataacttgcaaatacattagcacagtattttgactataataccttcagtgtaaagacaaaaaagactttctgaaaggttctgtaacctcattagcaatatttttgtattggcatggattggtacttttagaactgctttcaatgtaatctaagactgacaaatgagattatgtattgtggacaattgttgcactgctggaagagggagtaaccacataaaaaggagttggggaatagaacagatcttctagtgtggaatttaaattgggaatatcagcttatgaaatagttaaatagatacatacatgtatagatatatgtatacatgtatggatcagtgtatattatagacatatattaatatattatctattctagtgctctaaatatcaattctgagacaactggagttattcaagacttcttccgtacactatatggtcagtttcatttgggtctcaaagtacaagatccgccagttacttgttattaatttttccatggcatagtcacacatatttttacctgctttgaaacagcttttatgatgttatgttttaaaacttatgaaaatgaatatttgcagggataaatgattataaagtatttaaaagtttgatgtaatatcatacaaattgacagatcatattccgtgaaaacattacagctaattagaggacaatatttcttagatttctaccccccaaaaataattcattttatcctccattttgagtggtgctgaaaaaaagtattaaacagagttcttaaaatatgctataactagtagaaattatttttttaatttctattgttttcatttttcaaagtaaaatttatttaaaatttatatcaaaaattaagatttatcagactatgtctactttggcaaaataaactgtttttgtgatcattttgtctttcactatgagtcaaattattaaggtgagttttcttttcagcttattacaattatcctaatagacagcacaggatgctgtcaaagtcttagttttgagggttaatattaaatcaccattcttatatttcgcttcctcattagatcaataatgcaaaaggtctaatgtaatgtcaaaggacttgcattcatcaaactggaaataccttgtggctgttcattagggttatgccttccctgcttttagaaaatattactgagggatttttattcaaccaatgaatgcctataggatattttatgaaccaagttagaaaatagactgggggaaacgtatggataattggtaaccagaacaaaacagaataagtccaagattatgaaatataaattcctttctgtgctagaataaaaattgtacaaatacagtattattcaaaacacatatactgtagatatggagactcttgtttatcaccatttgccttatataatatttgcatttaatagaaaccaaataatttgaaattaactttgtagtcatattttattaattttacatttaatttttatttattagttgggtgatactcagtgtagtgcttatagtctgaagcagttttttgaaatctgtattgaaacatttaaaaaatatctagtggagcttctttacatcattcttcagtttgccatttatttttgtcaatatgctaacctcacaaatgctttgccttgtgttataatagtccaaaaattaccctaatgtttccttaaaaagtagttttttaaagaatctgctacattaataacttcatgtaacatttaacatgtaattaaacaacatattatggatttactgagttattgagttaggagattttcactgaaataacaaactgtatagccgattcagttatagctggtatgttgtaaaagcaagatacagacagacttatagtcacttaaagtcatataaactgcataatttctgtaatttataatgttatgtaaattgaaagtacacacattaaaagatgctttacatcattaattattaataaaatgcaaattaaaaaccacaatgagatactatgacacgcttgtttaaatggctaatattaaaagaggctacctgaagtattgcagagaagagggtggaactggaactctgatactctgactatgtgtatgtaaaatgacacaaccactttagaaaaacagctcaacaacttgtcttgtttcatttgctaagcatatgtcagccatatggtatagccagtctactcctagatatttacccaaaggaataaaaaggaaatatatgtccgtatatcatgtatcattataagagatacttgtaatagtcaaaatcaacctaaatgcctatgaataggtgaatacataacattataatgtacccaacaaatggaatattagcaacaaaaatgggggaactgctgataaaatcaacaaccatggatgaacctgaaaatgttcctgaataagcgaagccaagaccttcccctccccaaaaaagagtatgtattagatgattccatttatacaaaactcaacaaaagggagactaacttgtattgataaaaagcaggcaatgattgtttggggatggaacggtacggtagaatggatgagagacaggtattaccaagaagcatgaggaaattttgggggatgttgacatgttcactattttgattgcggtgagtatttcacagtgtcaaaattattcagttttatcctttaaatcttcacagttgcaaaaggttttacagaacaggtgttattttaaagcatcctttaaaagagtgtgtttttattctctgttgtcacgtgccccatgttgggctccttgaaccacaactctctcaatgcagaccatgcctctccttcactgccttattccaagtctcagccaccacaggctgctctagtcaatctctctccttcatctttctcaggcatgcgtcagacatcaattccccaaatctccagctgccggaaacaaatatttaagcttttcaagtggcactgcacccatagactttaagcaaatggcacacattcttcaccttgttgaagatacgaatttaggtctttctaattataccttttctgttagatataagtgagttctcgaactggttcctaaccacctacctagttggaaatgcaacaaactattttttgtctcagacaaagctacttggaaatgctacttggaaatgcaatacctattatttttatgtctcagataaaagtgagttaggaaacttccctttaacaatctgttacagatatactgactcaagaaatatttattcaatatctacagtatttaaggtaatgtacctggttctgtagaacataaagaggtaaacatattatatcctcaaatacctttaatataatctaatatgaaaaactagatatgtggtataattcagagagtggcatgctacaaaaaaagatacaaatgaagtgcaatgggaaattatagacacaaaggtgtcctttattctggattttcaggattcgggccagtggagagaataagaaagaacattcctgcggaaagcttatgtgagtaaaagatgaataaaatatgaagtatgataactttataagtaaaataattctttaccactggttatttccaattagaataataattcaattttacaacttcagacctcatgactttggtgttatccaagtatctattagtatgtttctgaatacatttaaatgaaccagttgaaatatttatgtgtatattaaattccaaaaatgtaataaatcacagagtttcatttacagtttattagtgagtagattacctcctctgcttcctggctgctttcatattgatctgagatttaatagccagatagaaatgatacttacacattgaaattgcccataataatgagtttttctttttgtattctatgaacagcataacaatgtcttatgataattaaaataatctgccatgtcatgaaaagcacacaatttagagatgacaaaaccaaaaggaaaaaaagttacgtaatgaatgtattgtaataaaattttcttaattcttgatctaactctatgaggatgtttatgaaatgagaatatgtaaatcacgcttgagatgccaggtactttaagggtaagatttttctggtaacaatggttaggtcggggaggctgtcaatcaggaacatgctgcacagtaactgatctctgaaggctcacactttaatgacacaaccaatacagtgtgtattggatataaggaaaaagaagaaaccataaaattgtgtgtgtatgtgtctgtgtgtgtgtattcacctgtatctgtgtacacacattctcttattcccaaacaggaagcaatggtcactgtcctggctccttgctacttctttgcaccactcaaaagtgccttccctcggaatgcaggccacattgttatttaaactggacttccctttcactatcattatctggcatcttttaacatcttctttatctcactcagtccttttatttcaaagaagttcatagagaagcatagatttggtggcagcaaagaggtgagtatgattagcattttgacctatgtaaatgacacgtttgttatagcctatctaggaaatttgcctctcataataattatttaaaatatatcactagggttgccattgctaaattaggcattgtaacttcaattatattttaattacataacaaaatgataaaccaattttaaaaactattgacatataaagtagtatacaaaatcaacattttgttttaaattatttagtaaaattttatcatatagtcaattagttggcatgacaataatttttaaatatctgatatttttcaaagaagactataatattcacagttctttgtggtttaaaaacacttttatctgtttttccagttgaaataattatagtttagggctgggcatggtggcttatgcctgtaatcccagcactttgggagactgaggcaggtggatcacttgaggccaggagttggagaccagcctggccaacataatgaaaccctatttctacaaaaaatacaaaaattagccgggtgtggtggtgtgcacctctagtcccagctacttgggaagctgaggcagagaatcgtttgaacacaggaggtggaggttgcagtgagctgagatcatgccactgcacaaaacaaaacaaagaaacaaataaaaacaagaaaaaaagaaataattatactttaggataaagtaggaaatggattttttttagtatttgaaaaagggtgctaacaagctcagagaaattaagagacttattcaatggtcttctgactccatgccttttattttttctacaatattttaaacatgatgattgatatggtttggatttgtgcccccaaccaaatttcatgttgaattgtgattcccaatattacaggagggccctggtgggaggtgactggatcatgggggtggatttcctctttctgttctcgtgatagtgagtgagttcccacgagatctaattgtttaaaaatgtgtagcagctccctgctttgctcttcctcctgctccagccatgtagggcatgcctccttcctcttcgccttctgccatgattgtaagtttcctgaggtctccccagacatgcttcctatagagcctgcataaccatgaacaaattaaacctcttttctttataaattacccagtctcaggtatttctttatatggtacaataactgactaatacaatgatatttagaaataagagacatggatattttgaataggttgccacgtagtaaaacaaattgaaaaacaaactaaaaatatgcatttatctaaacaactataaaaggtatacagtcagtaagaaaagtacatttgtaaaggaaattaatcactaatatgagactaaaatgcatgatgataaaatgacctcacaaaactacagatgaagtagatctaggaaggttataattggccataagcttaagtaaaatactcactaatctaactttctgctgggtatagagggatttatttaataagtgcaaacattgtgtattttccttaagaagtctaactgctgaagaaagtctaacaaattaaaacgagcagtatgaagttaattaaaagctaaatcctgggatgcatgtggtggctcacacttataatctgagcactttgagaggctgaggcaggagggtcacttgagaccaggagttccagaccaacctggacaacacatcaagactctgtctctacaagaaatttttaaaaagaaagaaaattagccaggtttagtggcacagatctgtcatcccagctatttaggagcctgagatggaagactacttgagcctagggggtcgaggcttaagtgaactatgattataacactgaactccagcctgggcaagagagtgtgtctctgtctcaaaaaagaaaaaaagaagaggtaaactgtgaagctcggaaattgtagcatagagagagataaaagtatgctagtatctagaagttagaggctgacttaaatcttaaagatcagtcgtagtaggattagaaaaaaaatgaaaagaaagatgaggtaattcataaagaaagacaaaaatgagcaactatgcaacacagtgaagagattaatataagtatagaaaatttatgtagagaggagatagctattaaggccaagtgggtgatgggcttagacaagtatgatagaactggattttgtgagaaggctttgcattctgactctgaatgcaggtttcaaatagatacagaaaatttgtgaagaggtaaaaagaaatcctatacatctgccttggcactaatcaggaacatgatccttttatttatctgttgctggatatatatatgtatatatttttttccattgggcttacaaatttccatttctgctatgggcaggggaagtttgtaaaattaaagttaaaagaaattcagtttgttttaattttaaaatggtttcctttgggggaaacactaagtcttctaataagccctctgctcctcattattgctgacatgtagaagattcttatatgtcctcatcataatgggacaatggacctatgctctgatttggatccttgtgctgtcctcgggctcatgaattaatactccttagcagtaagtgtcttcctgccatctaggctgcaagaagtggccacaatcagagacttcagggccctcctagtgggtccatccccaccatgactcttgcagatcctgttgaatcctgagtactcaaacatgtccttcattcagtatttgtcctaggctctttgtgatggttaatactgagtgtcaactttattggattgaaggacgcaaagtcttgttcctgggtgtgtctgtgagggtgttgccaaaggagattaacatttgagtcagtggactgggagaggcagacccatcgtcaatctgggtgggtgccatctaatcagctgcctgtgtgactagaataaagcaggcaagagaagatggagagcagacttgctgagtcttccggccttcatctttctcttgtgttgcatgcttcctgcctgatatggtttggctgtgtccccacccaaatctcatcttgaattgtagctcccataattcccttatgttgtgggagggacccagtgggagataattgaattatcggtcagtttcctctatactgttctcatggtagtgaataagtctcatgagatctaatggtcgggaaaccccttttgctttgctctcattcttctcttgtctgccaccattttgagacgtgcttttcacctttcaccatgattgtgaggtctccccagcaatgtggagctgtaagtccattaaatctctttcttttgtaaattgcccagtctagcatatgtctttatcagcactgtgaaaatggactagaacatcagactccaagttcttcagcttttggactcttggacttacaccagtggtttgccaggggctgtcaggccattgaccacagactgaaggctgcattgctggcttccctacttttgagattttaggactcggactgatccaccactgacttctttgctcctcaacttgtagatggcctatcattaggctttaccttgtgagtgtgtgagtcaattctctttaataaactcctttcatttataaatctctcttattagttctgtccctctagagaaccctgactaatacactctttaagctgtagccttggtaatggaatcaacacctaccctcagtacaaaacagacctaccggttctaaactgtgtctacacaacactcaagatttgatgcttaaacgtataggtggcattttcccccaaattcttaagtccctctctgaatttaaacaaaccaaatactgtttctcttctaaaattatgtaggtatgactttcttcaaggtggtcccaattctctaatacagtcaattagttggcactataataattactcaatatttggtattttcaaaggagaactttgttttttataattcttcttggtttaaatacactttcatatacttttttctattttgaataattttagtttacgataaagtaggaaatggatttcaaaaatatttttatatgaacaaataagcaaaagtcctgctagatccaatctccttcttactctgggaacatcttatagtgttgtggctctttctctatgaagttatgacctagatgagagttaaaaaacctcaagtctgactgtgctcttgctccttctttctctctgcacaaacagttaatttcataggggctaccactttgcctttttctcctctttccaagagatattcacccttcccacttttataggatagacaaaagttctcatttggacatgactaatggcctacagaataacatgaattatgaaagtatttactatatattaatactttcacaatattatttgtatattaactgacttttgtatgtattttgttataaaagatatattatgttagcactagcacgaaattccaggctataaaggtgaaagagtaaatcagatagtctatgttcttaatgagattacagtaaggcagaaagaaaaataattgaatagaaacttacaaaaaagtgttacaaagattttgaaaaaggagaaatcttcagcggcatacagcggagtagagagagctcaccttcaggccagggatgaaaggggaaacacttggcaactaaccagaagagctttgacttcatgtgacagttaacagggactggcttcatactggatgaaggtatctgatgctacattacgaaactagtctgatggtagaagataagtgcattggaggagagtgtgacaaggataaatgatactgtcagagaccccaaattgttgacgtagaaatgaattgcaaagagaacattttgggggaaatgctatccataaggttgaaaaataataattactgaaactggcatttatggccatggggaaatgtcatgataaaatgtaatccaataagatactgagaagtactaaataattatggcagaaatggaaagcaatctttctgctgttctacatcaatcaggtttctataattgtgtctagttttagatgctgaccttatttaagaaagggtgaaaaaggagatggtcagagaagagaaacaaagataattaaccctcgggtaaatagtaatattaaatgaattagatttgtttagcttagagaaaggaaggacaagggcaatctgattatagaaatgactcatacatagagtaattaggagggaaatgcagttttctatgtccacacaggactaaacaaaaggaaattgactttaataaagcagtaattgtatttctagatttgtttaaaaaaaaaaaaacaccgtttaaacactactactaatcagctactgctctatatttaccatgtttgtgtaggttcccacaggactgtctcttgagtctccattagcatctgtctgtgctgactgctctactcatgtggttagggatttaggactagatgtactcatgggtgtgtgatttaaacacatttgcaacagtttcttaatttgatttcatagatgcgctctgacaaatgattgaaaacactgtaactctgctcttttaagtcaatagcctccccataaagtgtgatttaagtttgcagggaaagagaaaaaagatctgtaagttgttttgttagtttttatcttattgcaaaaagtgaaaatcaactccttataaatatattattaatcaagagagtttttaacatatttttaagaaattttataactcactttatgatttttacctgttttagttatatggaaaaatctgaagttactaaaaaattaaaattgatatttctaagtgactcgagaaagttcacgatgactgattttatcattttttacaactacatagaaacttcctgtgtatcgaaactttctgtaccccctttctataaactcctataagttgcctgtccacaaactgtgtatgtaatctagggtcaatggaaggagcttaaactctacctataagagaggaacatcaatgtatttgagaacataagttaaatccaccaccgtactatacatacatatatttatgaaaaatttttgtacggtgctaaaaaaactatttcttgcatgctcctttaacctttaaatctataaaggtccagtgcattaaacaagtcatatgtgtccaggagcaaccatcaaaacggttatagtagcaagaacttgggagaaggttgagctttgagtgtgatgtattgtaaacagttagtctggaagaaaattgcatagtgcatggcacaggaagatcagaaggtggaatcacaactttgtttggaaggcacaggtcgctaacacatttgtttgggcttgcttgtttgcttcttcgcttcttcttattatttactatgaaaagcagggatgccaaggtgacatgtgcttaagaactgtaggttaggtagtctcagtggtaagctggtgtgagtccaacattaggattaagggggaccgggtgcggtggctcactcctgtgatcccagcactctgggaggccgaggcgggaggatcatgaggtcaagagatcaagaccatcctggctaacacggtgaaaccctgtctctactaaaaaatacaaaaaaaattagccggccgtggtggccggcgcctgtagtcccagctactctggaggctgaggcaggagaatggcgtgaacccgggaggcggagcttgcagtgagccaagatcgcgccactgcactccagcctgggcgacagaaggagactccgtcccaaaaaaaaaaaaaaaaaaaaaaaaagggagtaagggagacgttttaatggagaagttgagagatattatcatcttacctatgtgggtcagcagtgtattgcagatgacaaagaaacatgagttaatggagacagatgctttggaggtaaaactcactggcttagttgacttaagatgtaggaggtgccatgttctaatacctaaatcatggccttgtctttctgttaagaagttttctctaagggtcaaattcttacaaccatttacattataattgctccttattattagatagtacgaacattttaacagaaagtcaatttgtattaatttgtattaaatattatatatgttagcatgatatcagtattttcctaacatttctaaaaggtttaatatttttaaagtacaatatagccctgttttattcctctcatttaaaaaataaatttaaaattttgattgaaaatttaagaattttactcttctcattcaaaaataacaataaatacattaactctaagtgggaagtttaaagagttaatctttggtgaatataatatgaaatatgacagcatgatttattattcttgtggctatttcttaggttttcctcaatatattactaacttttaaataataaagtcaattataaatactgcattttaagttgactacaaaacttagctaattttcttataacatttatattttaaaaccataaatatgaataaacatgtgcaaatattttaaaatatgcaatattatttaattgtaattatatattgtatattccaacaacaatattttaatactttagagacataattgtgttattctaaaaatgcttcaatttttcattaatcaggagcaatagcatgcatattgatgtaagaatttgtacataaagtattcactatttaataatgtatagtacaaattatgtactgtttttatgttagatataccaatttaaatatgatataaaaacaagcttttagagttgaaaatcatatcagttcatttatttataaatatgatttaactgctacctgaagacattgtttttatttttgttatttggttcttcacataatatttgagggctttattttcatatttgtacaatatgataaattagtctaattttacctcatgttgtaagaaaaactagctaaacattctccaaatttttgtttttaatatgggtcttttggcaataatgcaatcattttatttttctgcacggtactggtctgtgtaatggattttaaatatttatcaaattaatcaattgcttgaataaacaaattccattaacggcttgagatttatgtgaataccgtatgtagattatgagcctttcattgccaaaccattttactcatgcacctgtatttctaaaatttgtgagcacatactccaatatatgtatgatttgcttatagtttatatacttgtacaacttatactgccatactgatatgtatgtatattgcaaaaatctacaaaagagaaattaaaattaactaaataaaaataaaatgataattaacaaacaataatgtcaaatgatttgatatttcatatcatccattattttcacaaaaattcacaataaaataaattttgatacttattactgtcaatgaaacaatcactgacacttagtgcttagttcttaacagttttgctaatgatgatgggtaaatggtattattaacaagcatctcaaggcatagcacacactctcatgacattaaatacatgtttccaattagtttcactttatttccatttctgttgtcatcccttgaaatcttcttaaattggcatttgctttatcctgtagttcttgacaaagttaatatgctctaactaagaacatatatgctcctccattgcttgtttgcttgtgtttatactatgaccaatattgtcaactaatggctctttgcagggatatttttcagctgcttgttcatgttataaaacttaacttttgttaaaataaaataatactatcagaaattcactaaacctgaaataggaatgttgcatgcatgataacttgttaggggaaaaagaaagtaagattgtcacttctctttctttaggggatatttacacaatgtaggacaaccctccatctgtcttaagatgaagtgagaacatcagtatttatccatatattaaatattataaaaataatatttctcgacatttaaatattatccattgtaatgttttcttcttataccccagtggatcatcttgatgcatacacctcactttggagacaactaatttcaggaatacacaggacaactgtgcccctgcaaacaaggggtacacgaatggtgtctggagtcttccaaaccatctcaggagtatagctagtaaatcagattttggtaattaggaagttgtctaactccaggcttgcaatggacatagaatacttattaggttctacccctacctatgaatagaatatgacaaagttgttccagacttttgcacatcaaattgtccaataattgatgatatatgccactcaaataagcaaccaattttgtcagtttcctttgaaaagaagactattcacaacatggtaagtattatttcagcttagtttagcttaagtatatggataactcagaatgctttcagtgtatgcatggaatattaatttgttctaaaaatatttgataaatatctggcactcttctaatactagaacagtggtgaaaaaaggaaaactcaccctgaactaagggagtactcagttacaaaggataaaatgtcaagtagcagagagaaaagaccagtgttattttctgcagggtgaccaggaatagcttcttgaataagatgatagttgaagagaccagaaggaagagaggaagcaagacaagcaggagggtgtactagtagggcctataaataaagactatggcacttgcaatactataggtgagacaatggtggcttatagcaagtcagtaactgaaggccatgaaaattgattagattccgactatatcttgaaagtatgacagtagttgttgggagtatgcaatctggaaccagactactttggtttaaatcccaaaattgcctgtttcttgccacatagcagagtactacttaaactttttatgataccttatctgtgtaaaacaggttactgtgttacctatcttaatctagttgtgaaaatttctcctttctgtgtgcgtgtctgtgtactagctagaacactatttgacacatagtaaacactgttagcttttgcaattactatgggaggagagaaaaagagatgagtctaggaagaccccaaggttttggtgtgagcaatataggaagagtgggattgttttttactgaaatggggacaactgaaaaagaagtaaattcaggagtgattgaaaatcaaagtgaagaatcaaacctgctaaatctgtgatgactcagagacataaaaatgaatgcttttcataggaatatctcaggtgacagattcagcctgaagcaaagaagtgaagttttcaacatttatatgatttttaaggctatggaaatgggtaggattaccaaaaaagtcattataagtacagcaaagataactcaaggctcagctctggacatgaaaactttagaagaagaatcagcaaaagtgcctgaaaggtgaaatgacagaaaaattattaagtcatgggttttggctaccaaaaagtaaaacctgtttctgtatgaatgagtgatcatctgtgccaactgcttcatataactcaagtgagatgaaagcaaaaaaacaatatatctagtagatttaacaaacaaatctcattggaagctttaactgtaattgttgtattaccagacatgatggagttcaagggagaatggaagaagaaaaattggattcaacaatacagacaactcaggagagttttactccaaagtgtggagagcaatgttgttggtgatagcagagagactgtgcagccaaaaatattttaaaattcattctgcactgagttatttcataatagaaagtacaaaagtgtatacaaaaaaatcatttgagagaggataatttcattgtacaagtttaggatttggtttttggcgttagatagttatacacataagacaaactaaaccaggtggaaaaccagcgagtagaattgcagagataggtagatagcgcctgaaaatgtattgtattttacttctgattcattgtccttttcaagtttacgaagataatgttttagaaaagaactaaggtatgatatagtccttgagattagaactatacagtaaatataccaggaacattgagtaggatctttgaacagaaggtaaatggaggctgctagtcataagttaaaagcaagatgagtcagtgcgggtgtgtgtgtttttcttcaactactttgagttgctcagaggcaggcataaaacagggagagagcttgacttaattaaatttgggtttttttcaaggttgcaaaatgcagaaggacaagggacaaggggattgcaaatacatgcaacagaatgattataatgatagctcatagaaaccaaagcaggtaatgagaagaatgaagacataatggaaatgacaatcagcagcaagtcaaaggattgaaggaagttcaggtaggaaaaaaatggtcttggaattctcaagtaataaagaatttggaaaattagaagtggtggctggagagtgtgaaggttcgagctgatattaaggaagaaatgtagtcgctggaaataacaacaactagggcatgaacagagagtcagtaactgaaggcccagatcattggaagtgaagaagtctcagaactctaaggttaggggactaaaaagacctttcatgttaatagtaaatcaccaaattttagcagaaattctattggggggatagtgtaacaagtggtacatctttatacagcaaacatctgggaaataaaggcagagtcattctgttgggttattatcttctaattcaacaagataatgagcagagattttattatttggcagcagaaaagttcaagatgctaaaggttatctatggggcacatagtttaagtggctaaggcaaaacattccatcagagaaacattagtggagaatataaatgaaaaattcctgtaaatggttactttattaacaataataccttatttgtctactatatagcagttgacagtttttagagcattttatttgatcctgacaacatctgtgtgaagaatatggagacagtgttatgcttctggggaaaaacatgagggctttagatattaaccagtcctgactgaaaaccactaaattaatggcaagaacccaaaatattatatggctttgctgagtaaatgtgttgctctttgctctgaaacattattcctatttcttttttttaatatttatttctattttatagcatgtctactacaggtgagtagagttttgtttgaataaaccaaaataggatattagaaatgcctatcacgctcaaaacaatgataagattctgtttatttcatgaagtttccattaataattagaataaatttttacacatacatgtgtaaaatatatacatacgtgaaaaatacatgtatgtatgaaaaacagatctggaccttcaattgagggaaatatctatgaagagaaaatattttttgaaattttatattattcagaaagtttagatagcacatgatttttaaaattacaggatctttattacagtattatatgacatacagcaatacactgcagaagagaattattaaacacttcaaaacattcataactgtttgcctcagaaaaaatattttcaagttcatcctcttccagaatgcttaaatatttctacgatttatttaattcatatcagagtaatgtgggcactttctatcacatggtcaacttactgaatctattgaaacttcagattcctcatctgcaaaacagagatatcagtgcaactccccagggctatgatgaaaagtgaaggagggaatgcatgaaaagttctgagcactatgcctttgccattgtaagcacttgatcaatggtagttgctgttgttatacttactagatttttataatttgttcccctttcaaagttacaaaataaataatattctgatattgcaactctttttttaatgatcaaagcacatgcctgagtatcaaatattcctccgtgatttacaactattttcctgtctcttggacaggtaatttgaaatcatactctagaattgtttttaaatgcttgctctagtgtatttaacatatatagatttttttatcctctttgtattgcaaatgcattttctctctaaaattaacttcaggcttccttttctttcctttgggtagaatgaagtaaagataaaagtaagttctgaaataataaatgtcgtcccagtatgtactccaagctataaagaaaattataaatatagagaacataaaaaaggcaaaatgagatggtcaaaataaattctatcatatcaaaaactcaatacatataaatatgaatatatttcctaggtaacaaaaacattggaactttcgaattttctgttgggttttctcagaagcagaccatgagaaaaggatttgagtacatgtaatttatttggtgtttgcatgaatacaagtaggaaagtatggaatgagaaagaagccaataaaaagatgcatttaattgctcttatagatgtcaagttaattctaaaggaaacctttgggaaactatgcaaaacatacatatcagaatttgctcctaaagggctgagggggctggagtacacagacaaccactttgcaaagtcagtcactgagggtttcttcgaagctgggtttggagagtgggtatttcattccctgtatccagcaaagaaacttttagtttttatcgatatattatagtggtagtgcatgtcttctgatgctgaatttgctacattagctatcgtgtgtgtgtgtgtgtgtgtgtgtgtgtgatctaaaagggtgtatttatatgtcattcacagtagagacaaacaacacacccagaagataatacaaccaaaatttaaaaattaaagatggaatatacacagaaaaaaaattatcaggcagttaataatagctaaatagcaagaaagcaaacaaaatactagtataaagagtattaaaatatctcgaactgaaaattcaatatgccagattttaaaaacattccaaatttcatgtatctaacactatagtttcaaaatatgtaaagaaagatgaaaatacaaggaattattggctaatccaccatcttattgggtggttttagcacaccttatacagcgattgacagaaaaagtagacaaatttagtgaagctatagaaaaagtgaagacactataaataaaattcagctaataaataaccactataactatatagataccaatacatattatatttatacattactaagtttatatatatatactgatctgcctatgtctcaagttaaaattctcattctcaaaaaacattcaattaaattattgtatttaaaaaagagataaaattgattcaagggtaagaatgctgccatttttggggaagtctaaagagttctgaagaaaatgtaaacaatgacaatgtatataaataaaatataaaacaacaaagaataaaaattaacagagcaagtctttgcagcattacattgtcaaaattagagttaacagaaactatttcatacactttttaatagtggataagacgtttgaagcaatgaaacccatatgatatttgaacccaggttatcatatcttagtctcatcccaaacagttacagtttatgtcaaatgaaattacagcgaaaaatattatatgagacattggtctggaagacaatggatctgattcaatctgacaattaccaggattttatcagcagaattgtctcttgatctggaaaggaaaacatactctcgttttattcattagtctctctggaatggcttcatcagcatgattatgtaaacctggtctgtatccaaattatagaatgcaccggactgtgtttcaagaaatagatggtctcagattttgccaatgttgtaggctaaagacttttgatactagaaccatgccattattaagatatatgtaatttttgaagaaaatttttattcttgggtaacaagaagatgtttctaagcagattaaattttataactaatgtagtattaagagaggagtacttatatatccatgaagtgaattcacacaggatttcatcaggacatgcaatcaaaataattaagatactatctgtaaattaggatttgagacacaaatccttaggattctgagatacaaaatcatttgaaatacaaaatgagtgagaacctgaaaggaaatggaagtagagcaagcaacatataaagcaagtaatttgtattggtaaaaatatcaatgggctttactatcattagtaaaattggccaaaaaatattttaatgtatttttaataaaatcaaagtaaagattgacaatgaacagaagcaaaaacaaaactcttatgttatactggaaaggtcatccttatatttggtgatgagcaattttcaattttctttacatggattgaagaaaaaaatgtacttacatttgtaaaataattggtggtagaaattatgtgatttctctatgttagagaaaataatatattttatattcattatataatgtgtgatataatttgattgtgttacatatcattaaaataacataattctttagtcagtattatttagaaactttgctgtacttttctgtttaattatcatataatcatgcagctcattcatacagagttaagagtgattgtcaattttaaaacttaccaaatatacatcaaaaaatttgtgaatataatttgaaacaaaacaaatattttactctacagttgcatataatttggtataaaattaccttttgggagaaagatatttttcctcaccatattaatttcacaaagaactagtactcatatggattccaattttctttttcttttagagacagggtctcactttgttgtccaggctggagtgcagtggagtgcaggtcacactgatactgaatgttgatagtgaattcacaaggatacttatgaaatagcctaaaaaattaggcaatgaacatagaaaaaggaaagttgggttgctttagggactgtcaacttggaggatatgcatcctagaagaaagtgaaaagaaaaaacagtagaaaaaatgttaacaatggtgtaacctgatatgcagatttttgcttcagcaaatcacagtatatatgaaatgtgtagagtagtcagaataatgcatccataagatccaaccccggatgactcttcctttctcatgatctactcaacaatctgcccaccctttgtaacctgtacacaatgtcttaatagttcatctttgttactgtttcttatccactgttaatgagtcctcactaatggtttccaagacagagaagctaataatataatcgcagctgtaaaatactttctctggcttgcataaaaattattgtatagaattatggaacttggtgacttttcctctgtaatgctggcaagattattagatacacaagtatctaatacgtggccatgagactaatcctagctgtatctaataatttcaaatatgacaggtgttcttcaagtcgaattgttagaaactattttcttaaattaaaaatgtagctgtacattctggcaagaaacacatattctggcaaagtgagcctattcactgttagaaccagagtcctacacactataggaatgtgtagatacacatcttaggatattgaattgcttagtattcttcacattagggaagattcgtaacttaatcatgtttgccagttaaaattggaaaattgttctgggtagaggggaggttagacacaagcctgccttacaggtttctggagccataagggacagcacttgtacggcataaaaccctaagcctagaatttaatttacaatgatcacatgtggttaatccccatagatgctaagcagatgcactttcaagctctgcctgtaggaaagcaagacatctgtcattattttgttataaggtaagaggggtgagggatcaagatagagcagagaacatttaattgaagacaatacacttcagaattaaaattatgtctagtaataatatttggatacttttattcacaattaaactgatttgaagcaattagacaagatgcctgctaagacttctttaataaactttatgttaacagaattttggatatacagaaaggctgcaaggtgagtagagagagctcccagtctccactgccactaacatcgtgcattagtaagatcatttgtcacaattaatcaaacattattgaatttctcattaaatacagtcaatattgtgttcacatgtttatcatttttaatctcttgttctttcagtcaatattatgttcacatgtttatcatttttaatctcgttctttcttctgttctagtatcccgtccaggttgccatacttcatttaatgaccattatctccttaggcaccgctagaagatgagtgtgtctcagacattccttgcttttgatgatcttgacagttttgaggagtactagtcagatattttgtaaactctccatcaattcagattcatctggtgttcttcttatgattagactaggatttttgagaaaaacatcacaaaggtaaagtgccatgtttatcataccaccaacatgatatcatttttttatgctatccttgatcacccggctgagagagtgcttgtaacattacttttctcttcctcttttttatatcatgccttttagaggtaagtcactaggcacagcccaacattttaaggggtggagaccttaagtctttcaagttaattatattagcaaggacaccaacagctcgatatgcggagcctttgattgtacaattaataagcaactcccaggacaccaaacctacattcaccccccaggaagatattctccaatatcctcttactctgaccagggcaaattactatacaaggaaaatttcccagggggacagccaaaatgcactcaggaccatgaataagggaattaattctgaggtgcggtgtcctgcttagtgacatttgttaaatactttgaacaaggcctatcatttcctcttccgccttttgcaaatcagatttttattgttattctattccaaattcaatggtttttgacatggggagtgtaaacttgtcttttagttatctaaactaagtgtccatattggaacttgcagtatattatccattgttcattaacatttaatgacattgtaatttagtagggaagggttctttgttttgtttttgtttgtttattttttgctggagatgggaagagtttgtatcatttgtgagaagcgagcgcatggatatttggccacagaaatcaatgcaaaaataaaggacattgtcaccatctgttctttcacagtaacagaacttttattctgcacacagtattgcccagaaaaaaaaaaaaatcacattcttttcacttctaaggaattaggtgtgttcatggaatgaaattctcttcaataagagatgtacgctggtgggaatgtaaattgttacagccacacaaaaaacagtagagaaatttctcaaaaaaaatgaaaataaaactatcatgtgatccaacaacccttctcctggatatacatacaaaagaaatgacatcagtattttggagagatatctacattctcatgtttattatagcattgttcacaacagctaagatatgaaagcaaagtgttcatcaacggatgaatgaatttagaaaatgtggtgcatatgcataatggaatagtattcagcctttaaaaagaaggaaatcctgccatttgaaacaatgtagatgaacctgaggacactatgttaagtgaaataagccaggcacagaaagaaaaatcttgtatggtctcacttacatttgaaagattaaaaagttgaacttatagaagcagagttagaagagtggttaggagaggctggggatggagtgggttagggagatgttcatagataatacaaaatttccacttaatacgaagaataagtttaagagatctattatacaacatgattactctagttaataataatatattgcagcttgaaaatgactaagggagaatttgtgttctcaccacaaaaaataagtgtatgagataatgcatttgttaactagattaatttagccattctgcaatgtatacattttcaaaacataatgttgtacatgataaatatgtataatattttcaattaaataaataaatacaatgttttaaaaatgtaacatgtacagtttaagggttaggtcataaaggaaaataatttaactcctaccttgacttccctgccttctttctgtctgcaatggagatgtatttttgagtcatttttgaatatgtaaattaaaaagtctgcatttttcatttaaatgattcaagttgaatttatgtggcttgaagcttcttttcgatatcaataaaatattgttttggctataacataatgcacagctaattgtgactcataaaataaccacattcagttatctcacataaccagaagtctaattatgagctgttttggattggttcagagccccagcaagccctggaggacccaggttcttgctctccattcttctatcttccttgtagtggcaatatcttccctcatagtataaagtgaaatgtcttgtctctaagaattgtatccaactatggcagcatttgaagcaggaaggaaaagaatgaagaacaaagttttcttcttttaataccttcatttattaaagtggaaatatttttccaaatccctcactactccaaatagtcttccctgaaagctcatggaagagaactgagtcgttttggtcactcctattcaaaatagtaagaagatacacttcaacaatcttcagcctctgtcagtctctgttacagaaggttgattttggaaagaaaaatacaaatgagaaggcaaatggctgctagggagacaagtatctgttcctatgttttagtgtacttttctgtaagaaagtcctttatagttcagatagtcaaataaatgggaaaatgtcaaatgaagatgatgactcctcatttttacaaattccctgaaacttcccttcctatatactcaaaagatgaagtttggtgtacagacaattccatcacccaggaagtgagcatagtatctaataggtaggttttcagcccacaccccctccctccttttcccttctagtaaatcccagtgtctattgttaccatctttttgtccatgtgtattcaatgtctagctccaatttataagtgagaatatgtggtatttggttttccattccttcattaattcacttaggataatggcctccagctgcaaccatgttgctgcaaaggacacgacttcattttttatggctgtttagtattccatagtgtatatgtgccatattttctttatccaatccatcttggatgagtatctaggttgattctacgtctttgctattgtgaatactgctgtgatgaacacacgggttcatgtgtctttttgatagaactatttttctttgggtttatactcaataatgggattgctagagcaaatggtggttctgttttaagttctttgtgaagcctccagactgcttttacagtggctgaattcatttacattcccatcaacagtatataagtgttcccttttctccacagcctggccagcatgttattttttgacttcttaataatcaccactctaactggtgtgagatggtagctcactgtggttttgaattgcatttcttttatgattagtaatgttgagcatttttgcatatgttgattggctgcctatatatcttcttttgagaaatgtcttttgcccattttagaatttggttacttggtttttgcttgttgatttgtttaaattccttgcagattctggatattagacttttgttggatgcatagtttgcaaatattttatcccataccataaactgtctgtttactctgttgataatttattttgctgtgcagaagctccttagtataattcggtcttctttgtcaattttgttttcgttgcaattgcttttggggacttggccattaattatttatcaaagctgatgtcaagtgggcatttccttggttttcttttatgaatttttgtagtttgaggtcttacatttaattctttaacccatcttgagttaatttttgcatatggtgaaagttagggttccagtttcaatcttctgcatgttgctagccagttattccagcaccatctattgaatagggagtcctttccctatacagtaacatgatgtgcaggtttgtagtctaggagcaatagttcataccatgtagcctaggtgtgtagtaagatgtatcatatgggtttgtgttggtacactctgtgatgtttgcgcaacaatgaaatccctaatgatgcatttagtatatgaatactaaggcaggtcttaaaaattatatatttaataaacaatgtacctaacagggtttctataagaaccagatggcatagtcaaatttgaagtttgggcacagtttattggatgcaaacaaggcatatatgactgttctgtgacctgagctcggtagcagtcgagagacaccaaaccacaacccttgaggaaaggaagcagtgataataacctgatagacgaaaattatggaatggaggttcccttgagagcagcagtgacaatgaattaattgcacagttcaaatcaacctcacagaaaaggaaatcaggggaatgaataccctgacctactatcttccctcttttttcctctaactcacagcatctagtagactgagccaaactagaacagcaggacacaagggagcccattgatccatatattagaggtcagcttcatgtagtagataacagagttgaaaagtctggagagtgaatctaaaggagcaaaggaaaggtaccctgcaaaacaagcaaaacatccccatggaaagaaattcaaagggagaaacacatttgttttgacacaagctcggtatttcagttcactgatctagaggtagccacaataggtagccaacatacaaacactaagaaaattgcctttagatttttgttttaacaacggtaagagttgatggttataagaagtaaatgaacctagacagagaacacaggattcgagatatatcactagactaggggtgcgtgggtggggacgggaaatactatatttgtaggattgggaagatcgttgctaagtatttggatttatatatatcaaatatgaaccaattaattgtatagcaaggcttgcttcaggcccatattctttcactgatgtaatttaattagaatgatcttgctgattctttaactcttgttgtatgttttatctctttataccaacacattataccctaccaaactcagaatctttttttttcctgtgatggtttagaagttacacctagttcttctactctcttagttgttacttttaacttatatatctaaataagtatttttataattactgcttctagcccctggctgttaaataagacactgttagcaaattttaaccacttaggaaacactttttcacattgtcctaattgattctatttagaaattaaattctaatggtttggtcactattattgttttcacacgtgacagttaacttgctaatatattttggtcttttattgtagtcatcttttttggcagcatactgcattcatataggttgccatttaccaaaatatgtcttgcagatttaaagtgaggggtgtgtggtatgtgagtcttcttcatagttacttatccacatcaattatgaatgatggtgcacctggatggataatttttggtgacatttaccttttttgatgtaattcttaaacttttttgttgttgttttgagatggagtctcactctgtcgcccaggctgcagtgtagtggtgcaatctcggctcatcgcaacctctgccgcccgggttcaagcgattctcctgcctcagcctcctgagtagctgggactacaggtgcctgccaccatgcctggctaatttttatatttttagtagagacggggtttcaccatgttggccaggctgatcttgaactcctcatctcgtgattcacccgccttggtttcccaaagtgctgggattacaggcgtgagccactgtgctgggccaactttttttcagtgaccctgccatacattaatgattaaaaacttactgtcaatctaattaacatctctaaaatttctttttctttttatctgggagttcctataattttccttttaattatacctggtcttccattttactgcaaagggcctcagagtggttttctttgtagttatattttggcactgtcaatctgagacttcttagtattttaaaatgctaagaaaaacataattaatttttatcttcatatactgtttctttgacatttcctctattatcctgtgaaaatcctactaaatatgtgtcgcagttcctaaatcttccttatttttattttttggcaaattacttttcttgtgttgctttctgggcaaattcctcagaactgtctctagatgcactcattctttctttactatatgtggcctataattccttccactcattaatttttttaattcaatgactacattttctcatattcctgataagtcaatcttataaccacatgaatttatttaatatatgcctttttataatttttttctttttattaatgggattccatgttttatccctatgagatatctaaaaaatttataataaagtcattttacgtttcattgttatgatctgaatgcttgtcctccccacccccgcaacccatattcagatggtgaaatcctaacccacagctatcatgactgggaaacatccctttataagataggcccaagggagctctttcacccattccactatgtgaggacacatatagaaggtattgttttcataaaccgagaaaagggcctttgccaaacaccaaatatgctggcaccttgatcttggacttcccagcctctagcattatgaaaatacatttctgtcatttataaactacttgttttacgatgttttactatagcagcctaaaaggactaaaaaatcctctattattttcaatttatctactctaaattcatctttcaattgatttagtttgctatccttattaatagcaatttgagtttccagcttttggtttgcaagttagtaccaagttgggggttgtttatatttttatgtttttctctctttatctttgtgtactcaccccttcctataatgtggttttgtgcgttataaatttcttctaaccagaaccagaaagttctaatttagttggttcagaatccgtgtgccatggtgacattggtaaataacataaacaacatgattagctgcatggctatatctgcttcattccacttcattaggtgtgaactctataacctcagccaaaacagccatcacaactttttttttttttcagtctcctttcaaagtaagaaaccaggctcacgtcttgatttcaaaaagtcaggaatgttctccatttcagggaaaccttttaatagctattatacccaaagataactcattttcttcttcctctgcttgttttctgactgtgatactagcaggcctgcatatttaaacctgcttattgctgtgtgtttatattctttttggtcctagaagacatctgttgtaagcttagattcttctaatatcattatgcacttagagtggggcagagggtggtggatctcaaatcataacccttgattcattgtttaatgactgatatttttgttcccatttataattatttgtatgtatacgtatagatatgaagaaatgaatatgttgtttcactgatggagagaaaataatttaataattaaaatgggtattgctttgttttcttttatagataggtgaagcatttactcttggcaactctgctacttaatcctgtgcatatagatgatatatgagacatagctcttataatgaataagttgttaattacagagatgtacagattaaattagagagaatgtattgcatttggcaatttaatgactataataaatatttaaagtaatgcactacatattttaattctgccagaaatttttttacagtgctgaagcaattatctctgggtaaatccaactgggccacctgggtcatcaccttgacatgcagggtgttctctacagtatattcttagaacatttgcaagttgcaaatgatgtaagctgtagttcttcataaatgacttcatagccaaagtaaagcttctttcatttaatagtgctcacagtgagtcaaataatattatagaagtatgcagattgtatttttgtctttcagtgtaagaagggatgagtacacacaaataaagttgcacagatcagctaaatagttatgactatcagcatgcaatcagatttagaagtatgtcataagatcagtcttaagatcaccttctatatctagggaagagaaaggtttatgtctcctctctgaaggtttgataattgattccacaaaataaattgacagtggtgaactcaaaagcatctgagacaggtttcaatcaatttagaaaatttattttgctgaggttaaggacacacaggtgacaaagcctcaagaggtcctgaggacatatggcccaaggtggttggggtatagcttacttttatgcttttcagggaggcataatatgtcaatcaatacctgtaagatactcattggtttgatccagagaggtgggacaactcaaagcgggggcatctaggttacagatagatttagaaatgttctgaaaggcaatttattcagttaagttattttctaaagatctggaatcaatagaaaggaatatctgggtaatgatgataaagggttctggagaccaaagttttatcatgcagaagaagcctccaggtattaggcttcagagagcagagaatgtaaatatttcttaccaggtttaacttatgtggtgacgtcagtgctggttggcttttcctgaattccaaaaaggaggtgggtgtgctaaggcatgtctaaacccccttcccatcatggcttaaactggattcaggttaaccttggaatgcctttggccaagaggagggttccattcagatggttgaagggccttagaattttatgtttgctttacacagtagacagattaacaggagaaaaaaaacatgcatgagagttccacaaaatgtgagactcaaagaaatgtcagctgattgaagtttatacagcatccttagctatagaaaggaatgggagcctggagcttctgtgggtgttgatggtgacatgcaggacaaacaaagtttgtctgttatgcagatagaaagtctcccaggtaataagtggtctcatgagagcccatcagaagaatagatgatagtctgtgacaaagtgtgtctgtgtgtggtatctcctctgagttaatcttctctggttaatgagattcttgagaaggaagctcttgaaaattgaattcccttttgaaagatcagtctttaggtaggtaaaggaagttcagagagagttcctctccatgctttgggagacaaataaaggagggcaggaaaaggtcagcaagatcttggttatcgtttagcttaaagcactcagcatgccgaagcactatagtttgggatgtcattttcctgagccccaatacaatttctcacatctgaaaaagaaaaatgaaattctaagcccctcaactccctcctgactaaggggactccagagaaactttgcaagctgagttccctgccatggtaggatggggcttcggacacttctcattacatccactccctcgctaactgccattaagcgttcttccctaagggataaaccagaatcagtcctttcaaaacactccaccctgatcatgttaattactatcttatctttccaggtatagaacaaagacgagattcatcattccttcacccctctctgagatgtctgctttctctgttccctttttcttccaacattcaacttatcttgcaaaatgtagatgtaatgagcattaactaaagtctcagaagtatgtagctatacacctcacatccctttctgaggaaaaatgtataaattccaaacctcctgggatccttttggaaaaaagcagccaccaatgtgtctgtgactcacatttttcccagatggaccatcaaacaggctcaataagcctccattgattgagacaccagcctcaattaccgtgacatccttcataaaacatttccaatatgtggtaattcaatttgagcatccacattttcaaatcaaatgatgccacagtaggggacaaactgatccatgggggtgaggtggggataattattagaaagcttttccaaattgtgacttccgatttttctcatcacagctatgccagacagcatccaaatctttatacaaaatgccatgttttcaaatatgtaccacaaattattgctgttaaatgtcttttctctgtatttactatcatccatgccccccaacaatttcttaaatactatggcttttcttgtcttcattattctgcgtatacttctagagaagaggtaatgtagtacatcatcattttcttaaatgtatttcatcaagaacttaaggtaatatttcagatggaaataatcagcacagaaaaaattgtgcttattatcctctttgccttatgcactgtaatttattaaactcgaccatgacctttccaaaccttccctaattcggaacatttaggattttcattacttattttttctaggtacccaagactcaactagttgatgctgagtttgcaatcttggacgtggccaatatgaagctttagctagtctggggtctagacttaactttctcctcttaaatattcagtctatattttttcatcttcatttggcttcccatcatttctcaaagatatttgacataactttaattaactctttttgaagtttgttcattgccctgagatgtaatttgtctgagccatgagtcaagctcatttagtaagctagttgctctcttacaatttttctcaatacatttgattgattgtgttaatcaatttttcttcttaccaattggtttcaatctcatttccaaattacagagaaaatagaagcaaaataacaattaaataccttattttcttatttttcagtttgttttttgaccagatctatggtgtctctgttcattttcttcctccagacacagtcaagttaacctggtcctctcctctgcagaaaaggtgggtccccgacaaaaccccaccctcaagtctgaaaccatgacccaaagtgagaacttacacctctgctttactgttctactgttgcctttttcctaaaccatccatgacccctcctcccatcctgtgcctgtaaaaactggcagagaggaaggtagctggacattgaagcctacggttggatgtcagagagaagcggcttgactctagaaagacagcttggtggcataacttcggagaagaatctggtcagagatggtcggaattcaggggaagatgatcatcctgccccatccccttttcagctccccttcccattgaaagccacttttatcagccataaaatcacctgaatttaccatccttcaattcatgcaacctaatttctcttggactccggacaagagctcgggagacccaagtatggatacaaaaggcagagggcccattgagctgttaacatttaagcagtccacggatggcagagcaaaaaaagcactgtaacactccctctggggcttccggggttgcaggcacctcccccagatgctaccgcggggcctgcacggagtttgctcctgccgccgcccaaaaatgcttgccctgactcctgcaatggctcacctgtgcagcaggtcccagtgagtggagttcggccctgctggcgttgaaacagctggctgcttccagcgttcatgcactccagtttcacgaggagttgaaaactgcagtctaggtaaatgagacacccttattgagagtcctgtgaaggggtcagagaaatataatatcctttatcacataggctatacatattaggtatatgtgtgtgtgtgtatatatatatatatatatatatatatatatatatatatatacacacacacatatatatacatacacagtcatgtactacataatgacattttgtcagtgacatattgcatatatgatgagagatattattatggtgctgccctatatactgtcatgtttatctttataacatatttttactgtactttttctatatttaatatacagataaaattgtgttatagttgcctacagtattcagtacagtaacaagctgaataggtttgtagcctaaaagcaaaaactataccatataccctggatgtgcagtagactacactatctatacctatacatatactagatttgtataagtacactctgtgatgttcaaacaatgacaaaatcacctaaggacacaattttcagaacatatccctattgttaagtgatacatgactacacacacacacacacacacacacacacacatacatatggagagagagagagagagttatcatggaatttatttcttatgagagaaagaattggttcacactattttggaggctgacctcaagggtgagttgataagctgaggtcccaggaaagccaatgatttaatgttcaacctgaaggccagcagcctcaaaatctaagatccaatgtttcagtgggatctgtggtgggaaaaacactgatgttccaatttgaaggcagtcaggcagaataaattccttcttgtttaagggagggtcatccttttggtttcattcagaccttcagcagattgaatgaggcccacccacatcagagagagcaagtgagctgctttactcagtctactgacttaaatgttaatgtcacccaaaaacacctccacagcaatacccagaatatgtatcaccaaatacctgggcacatattggccaagtcaagttgctctataaaattaacattacagtcccctaagactaactttatagatttttgaaatttgtattttcttttggttattaactattttttaacccttaaatgtgttaattacggacctttatgttagacatattaatatcattaaatcatttcacatcttcactctcatccaactcatttaaaattatatttacagagtttagtttttaaagatctttaagatattttaatgatacatttaaaattcagacattgtttttataacttcatttttttctagttaaaatctaggatacttgttcaaatcattctaaaattttggtccccataagtcactaatttcaggttatagtgatctcattttcattggatttttaccagataattaacttttgttattaaaaattggtctagtgtaatagtagcccttgttttttcaatattatggaaaatacaaaaagcatcagaaatatactaattattcagaccactctagcagtttgtgtttttccactgttatttcctattcctgttctaatttggtgagcttcattaaaaacacattactcatttcagttcattttacccatttacaggtgtttgcccattatgttatgatcttgctcctaattctagtctccccctccctctctctctctctctcttgttaaccaacgtctctctttttccctcctaaatcaaaaatatccatggggacaaaatttctttctgtttttggaggggacaaatctacatccaaaagaaggagcacccttgttatttctgtcctggcaattttattctgctgcgcatataccatctgttcagtatccggtattgcatatagcacactttcaattcgcttgtaagtttttgtttgtttcttttggctgtcttagcttatagccatgatttcactctaaaaatgttgattggcaggtactatttctttttcaccagtgtgttcctggttccaagaaaagtgcaggaacatatagtggaatctcagtataaacttgttgaaagaatggatgatgcttccatcatgttttggctgtgactataggattagatttgtctctggaattttcattttagcatatgtgttgactatacttcatgcatttattagagataacatatggtgacctggatcataatcccctttttatattaataaaatccagatttataacaaagtagtggagggaaagaggctataataaagagataggagacagagataactcatttctccaatacaagcaagtcatctgtgggaagaggagtgggatgttcctagtttatagtcctttagtgataaggcatgcagtcagccctctgtatcgccacgttcggcacagtggatttagccaatgacagatggaaaatattttttaatctcgataaaaaataatacaacaattaaaaatattaaaaataaaagcaataccatacaacaactattcacataacttttacaatgtgttaagtgttataagtaatctagagatgatttaaagaatataggaggatgtgcatagttatatggaagtactgtgccattttatgtcaggcactggagcatctttagatttgggtatcccaaagtttcctggaaccagtcccccatggatatatagggaacactgtacaaaaaaatggttccaggtttcttcccgctttgaaatgtaaacatgtctgtccagagataactctgtatttctctggaggtttttatctattcaattatcccttaacttccaagatttttcttttagtgcaggtttttgtgcaaagttgctttggccactccaggtctttcagattttcaaatacttgtttagaattagcttgagaacttaaatagcaacaaagccttgatgggtttagagattgcattgaatttatcagccaatctagttggggggtgggggtggggattgaatgttaacaatattgagacttcttgatctatgaccaaggtatctctttccatttctttgggcctcctttaatttcattcagtaacgttttgtagttttcactggacaggtaatgcacatgttcagtcaaatttatccctaaacatttaacattttgaagctataataaataaattttaaataaaataattctgattattcattgctaatatttagaaatacaatggattattgtatattggtcttgtgttctgtaaactttctaaaatcactggttagttctaatagcattgctttttatttccttttaaagattttatcaagttccatcagattttctttatagacaattatgctttccacaaataagacagtaagacaattttcctttttgcataaatctagatgccatttatttcttttccttgcttttgttcattggctaaaatatccagtacatgttgaaatgaatatccctctattgttcctgatcttagttggacagcatttagcatcaatttcaccattaattattaatgttggatgtatattttgcatacattcatgtattaattgcttgttactcctgtaacaaactaccacacacttattcacttaaaacagtacaaatgtattatcttatagttgtgaagatcaaaagtcctaaatgactctcattgcgttaaaaaacaaggagtcatcaggacccaaagctcccatgccctcctgaggcacatccccctccaggaactgaacgaaggatgtgttctgctatccagcaactctccaaacccagtcctttttgttttctatggaggtctcattacaagcatgattgattaaatcattgaccattggtgatcaactcgatcttcagtgccaatcttctccccagagttttagtgtggggctgaaagttctaaccctctaataatgcctcattctttctggtgaccacctctcatcctgaatctgtctaagggcccccagccaccaataaactcagtagcatacaaaaagagaaacagggactgagatcaaatatatatttcacaaataacagttaatgttaacatggttaattatattttattattttgaatgtaaaacaactttgtgtttccaagataataattatggtgaaatattctttttatatatttttggattctatttgctaaacgttaaagtttttttgcatctatattcatataacatactgaactataacttgcgtttctcacaatatgttagaataatgtggttctcatagaatgagtttcgttctcttcaattttctgagtttctgtagaattgccattatttcttctttaaatatttgctatcattctcttgtgaaaaatttagtaataaagaggattctttgtgagaaagtttttaactaaaattttactgttttcaatagatatgagatatctaggccacctatttctacctgaataaaatttggtcttgtcattcaaggaaattgaaatattgaacttaataaatttattgagtaaagttcttcctaaagtcaactaaaatacatttttctaaaggagaataatgtttattgggaaacagggtatttcaatatgaatacacacgccgtattaaattatgtgtggatttagagaggtaaaggacaaagcttttaaaggaaacatgaagattacataattgtatggacataattatccttggctgcaaagatcaataagatcaataacaaacgtgatgtcagttctaggatgaacaggcaattgctgggcagatgtctttggagaagtattttttgtgtaagtttgtgatggcctttgtgcaagtctgcagttttcgcagtcttttttgatattttttgttattaggcacacagcatgagaactttaatatgcttcccaggttctatttgtcagggtttctttcccttccttcctctctgtcttcgttttcctttctttcatttttttaattttttttattttcataggttattggtgaacaggtggtgtttgattacatgagtaagttcttattggtgatttgtgagattttggtgaacccataacctgagcagtacacactgcactcagtttgtagtcttttatccctcacccactttccacccttgcattttgattctgacaattttcacattattctctaattgtataatcacctagagtttttttttaactttctgattttttaaatggattatttgtgactcttctcttttttattgataaatctggctagagatttatcaattttattgattttctcaaaggaccagttttgtttttgtagatgtttttacattggtgttgtgatttttacttcattaatatctattctgattattaatttttcttcttattgctttagtttgagttttatttatagttcttgttttattgttttggagtcgatgacaagggcattgattttagatttttcttctttaatgtcatgactttctcccttagtattgctttagcaacatcacacgacttctgatatgttgttcttttgtttccattctgttcaaaatactttctaatttcactattatttggcacatgtattatttagaagtgtgttctttctttccatatgatggagacatttttgtagatctgtctgttaatttgcttctaacttagttcctaggttacttccagggattacaatcctctttaattactcgagacttgatttatggtccaacttggtaaatatttcatgcatacatatgaagaatatgtgttttgctgttgttgattggagtgtttataattgttaattaggttaagttgattggtagtgttgtgtaaatattctatgtcctcattcattcttactctatttgttctctcaattgtcagaagaggagaattaaaatttctaactacaattgtgaattttcttgtatattagttttagtttcatgtaatttaaagctatgtcttcctgataacctgacagtattaacattataaattaatctttatactcagtaatattctttgctctgaatcacattttttatattagtatagtcacttcatcttaattttgacaagcatttgtatgatttatcttcttaacctcttttacttttaatctatttgtggtttaagctaatagttcttaaagttttttttcttgcaagcagcatatgattagagcttgcttttaaatgcaatctgaaaatccctgccttttaattgaagtatttaggccattaaatgtgatgtgttagtggtatagtcagacttatgtttttcattatgctatttatactctatttgctttatcttttctctctcattttccctctttctgccatattttagattcattattacttttactataaatcaatttgtttctcttctataatttatttagttatatctctttattttgttattttaatggttactttaacttgtcacagtccagatgaaagagatattataccactctacacagttcacaagatcatagaataatatacagtgagtcctcacctaatgtcatcaatatattcttaaaaactgacttcaatccatcttgaagtaatttttgtataaagtgtaaggaagggatccagtttcagctttctacatatggctagccagttttcccagcacatttattaaatagggaatcctttccccattgcttgtttttctcaggtttgtcaaagatcagatagttgtagatatgcggcattatttctgagggctctgttctgttccattgatctatatctctgttttggtaccagcaccatgctgttttggttactgtagccttgtagtatagtttgaagtcaggtaacgtgatgcctccagctttgttcttttggcttaggattgacttggcgatgcgggctcttttttggttccatatgaactttaaagtagttttttccagttctgtgaagaaagtcgttggtagcttgatggggatggcactgaatctataaattaccttgggcagtatggccattttcacgatattgattcttcctacccatgagcatggaatgttcttccatttgtttaattcaagatggattaaagacttaaatgttagacctaaaaccataaaaaccctagaagaaaacctaggcattaccattcaggacataggcatgggcaaggacttcatgtctaaaacaccaaaagcaatggcaacaaaagccaaaattgacaaatgggatctaactgaactaaagagcttctgcacagcaaaagaaactaccatcagagtgaacaggcaacctacaaaatgggagaaaatttttgcaacctactcatctgacaaagggctaatatccagaatctacaatgaactcaaacaaatttacaagaaaaaaacaaacaaacccatcaaaaactgggcaaaggatatgaacagacacttctcaaaagaagacatttatgcagccaaaagacacatgaaaaaatgctcatcatcactggccatcagagaaatgcaaatcaaaaccacaatgagataccatctcacaccagttagaatggcgatcattaaaaactcaggaaacaacaggtgctggagagaatgtggagaaataggaacacttttacactgttggtgggactgtaaactagttcaaccattgtggaagtcagtgtggtgattcctcagggatctagaactagaaataccatttgacccagccatcccattactgagtatatacccaaaggactataaatcatgctgttataaagacacatgcacacgtatgtttattgcggcactattcccaatagcaaagacttggaaccaacccaaatgtccaacaatgatagactggattaagaaaatgtggcacatatacagcatggaatcctatgcagccataaaaaatgatgagttcatgtcctttgtagggacatggatgaaattggaaatcatcattctcagtaaactatcgcaaggacaaaaaaccaaacaccgcatggtctcactcatagatgggaattgaacaatgagaacacatggacacaagaaggggaacatcacactctggggactgttgtggggtggggggagcgggggagggttagcattaggaaatatacctaatgctaaatgacgagttaatgggtgcagcacaccagcatggcacacgtatacatatgtaactaacctgcacattgtgcacatgtaccctaaaacttaaagtataataataattaaaaaaactgacttcatatgaaacaacatgcagaaaatgcttgaataatgtcatttaattcagtatagtttcattacaatattgatgaggataaaagttggtttccttatatatagtttatgttaaagacacactcacttttcaagaacatatcaatgagattaggtgaggatttactgtactttcctttctaccttctaggtctttatgaaaatgttgttatacatttgacatatacagttgatccttgaaaaacacagagattaggagtgtcaatccccatgcagttaaaaatctccttataacttttgattttctaaaaacttaactactaataccctactgttgacaggaagcctgaccaataacatagtcaattaccacatattgtgtatgttatatgttatatgttactgtagtcttacaataaagtaaactagagaaagaaaagcattatgaagaaaattagaagaaaaagagaatgcatttactattcattaagtggaagtggatcatcataaagatcttcattctttttgtcttcaatttgaaggctaaagaggaggaaaaagaggagttgttcttactgtttcaggggtggaagagccagaagaaaacctgtgtataagtagatctacgtagtttaaacctgtgttgctcaaggatcaactactggatgtgtgaatgtgtatgtgtatgtgtatgtgtgtgtattatatgtgtgtgtgtgagagatatatatatatatgtatttgacatatatgtgctataaactccacaatattttaagctgtcaattaccttttaaagagatttaaggcatgcaactcatatatttatccctgtagttataatttctggtgctttttattccttaagggttatctcatattttcatctggtatcatatttcttctgcttgacacttacacttgttttaacatttcttgtagtgtgtgtttgttaatactgaattattccagcatttgtatatgaaaaaatatatttacttctttttcatttttaacaaaattttattttgaaacactcatgtattcccagagagtgaatatatatttcctcatgagccctttgctaagttttcctcaaaacatcttctaagactagaaagactataaacacaaagcaataagtgtgtttaaattaaatatgcaagatcgctagtttcaaagtcaaaaaacaagcggagaaagaaattagaactctgtgagtaataggaatgaaaagtttgacctatgatgtgagatcttgctgacctcttgaaatcaaggtctgggatacttttcttgctctgagcaaagactgcaaaaaggcaatgatggatcgtatataaacttgatgcttaatgaggtggaatgaagcagatacagccacgtatccgcaatgtctggatatattatacaaccaaaattcaaatctaatgcatcttattttcatttaatatttcctatttcttagcttctattttatcttctcatgtttttaggcatccacatgatattctatgtaattttagcttaatcttacagttcactaattttcaattaagcctcatttaatgagctctttaacaaattcactgtttttaataccaaatatataaatatgtatatgttaatatatgcaaatacacataaatatacatacatattttatatttttctgttttttgtttattttgtttttttgttgttgttttttgagacagagtcttgctctgtcaccaggctggagtgcagtggcacaatcttggctcactgcaacctacgcctccttggttcaagtcattctcctgcctcagcctcccgagtagctgggaatacagatgtgctccaccacacccagctaatttttgtatttttagtagagatgggggtttcactatgttggccaggatggtctcgatctcttaacctcatgatccacccacctcatcctcccaaagtgctgggattacaggcgtgagccaccacgcccggcctgtttttttttgttttgtttttttgtttttttaattttcgttataaggctgactattcttgtctgtgtatgacgaattatgtatttttgtgaactgattgctttacataggaaaggcacaactttgtaataattataaatttaggatcacgttttgttgtacaagtcagactcaggataatgggagcagctaattcccttataaaatgatctaagatgcattattttgttaagatgactttatttttggcttataattctatattttatttgttgaattgtaatttttaaaatatatctgttggctttgaaattgcttatcatttgacacagggaataaaagtgaaatggcataatcattagattttactttttggcagataaaatttggcagtacccaagccaaaaacacttaagaaaaataagattacacaacacataaagaatccaaagccattttaaagaaattaaagaattcccaacacatatatcttttatttattctaggaacattcaaaatattctctttcagttatttgaaatgtattgttaatgttaactatagttaccctactgatccattgaacataggtctcatttcttctaactgtatatttgtacccattaatcgacctctcttgatcctctgctcccctctatccttcctggcttctggtaatcaccaatctaacattttcatgaaacccactttgttagctcccacatatgagtgagaacatctgatatttgtttttctgtgcttggcttatttcacttaacctaatgagcttatgacctccagttccatccatgttgcttaaaatgacagaattatactttttatggctgaataatattccattgtgaatatataaaacatttactttatctattgttccactgataagcacttaggttgatgtcaaatattggttattgtgaatagtgctgtatctatctacctagtagtggaattaatggatcgtgtggtagttgaaattttagtttttgttatgaaataaatttcacttggttgaatatagtaacatagaataacagaatgtaatacttagtaaattacatgtttggttattcagcctttacatagagtgacaagagactcacagaagaacttgaatactcatccctagtaaattgcataatttctatgtcatgcaagtataaattattataaaaataagttccagtattgaggaatatatagaagtataggtcaaatgttaaatttaatgtgcatgttactgctaatattcattatcctattctctaaaatagtaaatagaactttattttagagtattattttaaaatagagtaacttcactgtatagaggcctgacaaaaactacctcagctaggtgatcaagattagcatggtcagtgataagtcatgttggtagcatgtattctggaaatgatgtgatagaaattgaaatttgcctttaagatcttcctctccaaacccataatcccagtttaatgagaaaaatgtcagacaaaagtaattggttgacagtctgcaaaataccagacatgtacttctcaaaactgctaggtcattgaaaacaaggaaaatctgagaaatagccaagaagaatctaagtaaatgtgacaactaagattggggtacatttccaagataagacagatagcaaatcagataaatacatctcattttcttgatgtttgatacattcaacattcatggcctgaaacacaaatgtaatattactaaatattatttaattttattgataatctatttgttatataacagaaaaatacagtagtttgaaacatatatttagcaccttatttatttatttatttaattttttgagacagagccttgctctgtcgcccaggctgaagtgcagtggtgcaatctctgctcattgcaacctctggcctcctgagttcaagtgattctcctgcctcagcctccctcctagctgggactacaggtgtgcgccaacacgctggctctttttcgttatttttagtagagatgtggttttatcatcttagccaggctgatctcaaactccaaacctcaggcaatctgcctgcctcagactcccaaagtgttaggattataggcatgagccactgtgcctggctaacacctttattttaaaactggccttcaggaatttgttaggaatttgtagaacatcacatttatatcagcttcagcaatgaaatttgagataagctagagaatctttgccaaaactgcctaacctgagagcccagctgcagaattaattgaatatattaaaatacaatgctactgatccaactagtcaaaatttatttgtgtttctcagaaacgtacaatgggagcgagagagagagggacagaaaccgaaacatgaagtttgataaacagtgcccttttataatttttgaagatgtataatttcttcataaattctactgtgcccttttatgagtgacataaaacgaaaaaaaagtctaatacctgatttactggtaagagaagaggctttagtgttaggcataacttcttaatatttatgaattccataatcatcgacaacttcaacaaactaaaaaatcaattttatgaaatctttagcataattttccatttttaggtttaaagtggtttgtaactttattctgtttatcataatgttatatgttattttctttgagctttgaaatggacttgaataataaaataatgataatataagaaaaagattgtgcaaccttttaatttctataatatctagtgtaattataaagaaatacttgaaggtgttttaacatcagagtttgttgaggttgtcaggctaagatgttgcagtaccccgcattcttcacacccagcatccttctccaatgtccgatcccacttggctgatagatttattatgttaaatagctatccaaaacattttgccggttcacattctcctcccataatccattaataaagaaacgttaattaaaatatctgcagtttatgtaagctcttaccttacaagaatgctgtcactctgtccttcaccaggtcaatggcagaaaaaagtaaccagaaaagcctagttaagacttgtttacatctctctcccttgactactcacccctcagatttattctttctactgaattttgtagactggcactaccaactaaccaaaaacagaaacttggatattattcctatcacttcttgccccttcctggccattatttgggaacattgcgtgtaatagccactcaattaacatctattaaaacaataaagaaatacagcactgatttcatacaatatcatcttggtacctggattttccacttgacaatgctgtgaaataatttgagattataatccataactgagaggtgaagccggctgggcttctgggtggggtggggacttggagaactcttctgtctacctaaaggattgtaaacacaccaatcagtgctctgtgtccagctaaaggtttgtaaatgcaccaatgggcactctgtaaaaacgcaccaatcagcactctgtgtctagctaaaggtttgtaaatgcatcaatcagcactctgtaaaaacggaccaatcagcactctgtaaaatggaccaatcagtgctctgtaaaatggaccaatgagcagaacatgggcggagccaaataagggaataaaagctggccacctgagctagcagcggcaagccagtggcgttcaatgttgtggaagctttgttgttttgctcttcacaataaatcttgctgctgctcactgtttgggtttgcactaccgttatgagctgtaacactcactgcaaaggtctgcagctttactcctgaagccaacgagaccacaaccccaccggaaggattaaacaactccagatgtgctacctttaagagctgtaacagtcactgcgaaggtccgcaaggtctgtggcttcacttcttaagtcagcgagctcacgagcccatgggaaagaagtaagaactccagatgggctacttttaagaagtgtaacactcactgtgaaggtcggaggcttcaatcctgaagtcaagcgagaccacgaacccacgggaaggaaaaaactgtggacacgtgaacattggaaggaacaaactccgggcccaccatctttaggaactgtaacactctgtgagggtcggtggcttcgttctcgaagtcagcaagaccaataacccaccagacggaaccaactccagacacataatggttactgttttatgtctgccattatgtttggatggtaataattattggtaattgcagaatgtgatgtaaccagtgttaaatggtgacatcctctcctaagttattcactgttatattccattactcaacttgttcacctaaaataatatgtcagtatttttccatgaataatttgagaaattttacatattctgtatgaagagtattcatgaatgagtcatcctatttctgtcattgatttttatgtgttgtgtcaaattgtggagaagactttcaagtgaaaggaacaaaaacaagactgtttatagcaggactggttcttcagctgggtaatatcaagttaccctgacagctttttctgtgatgctcttactcctccagtactgccacaaggctggcccctgacatccctacacatcacggcttacaagttgtgtcatctgagagcattttccacatgcatttgttgctgcaatacacatctcccatgtatcatcatttcatgttcctaccttgaattttttaaaattgcatttgttattttaaattagaagaacatctttttttaacttactcatttttggtctcaccaccaaaatttaaactacataaagacatggactactctgtctttggtatccatactaattccctgacagggtcatacttgcctacgtgatgaatcggctttatgttaaggcacacgtcttttgattcagaaaatgatatcaatccagaatagagatcatttgaccataaatttatttggatcatatgagtaagttatttgactgaaagaaaccctctaaatatgtacttcctcaggttatacaaaagttcaacaaagtgtaaagaacaattttgaaaaatgtaaagtcaaatttatgtcttacaatgccgaagttttttcttaaagtgaggaaatttcagtataagattcagacagaaatcttgattacaaggaacaggcagaatgtaagacaatgaaatataagacagtgaaactggactgttaacatcttagctacagaggcagcagttgtttagaaatgataaccacttgctaagtgggaatgaaggctaaatattgtcttatcttttgtttttgaaaaaaaattaaaacctagatatcaatttaaaggccctatgaattcaagttttggaagttaactttaaactttgtgaacaggctaaacaatgaagaggactgtaacccataggtcttcaatttttagccacacagctacatgctcttatcaatcgacttagggtccttttggaattatttttactcacatacacattattttgagggccatactaagaaataatatataaaattcacttttgtggtttttattgtaataattaagcagcattgtttataaccttaatatatattctttgaaaaacttaacacagtccttagtatttttacctttagaaatttgattttttcatttttacaaacattgtgaattaagtaataatattccactttgtgatggctgcagagaagccatctctaagaatctcaatagcatatatgaatataatgacagaaatgtcagataactttcatgtattgcatcactaaatcttaactgaacttgtgatgtactccaaataaacctctaaaatattagccttgaactcctgggctcaagcaatcctcctgctacgtcctcctcagtagctaagactacagcataccaccacacttagctttttttaaattattttttgtggagacagagtcttgctatgttgcccagattggtctcaaactcctgccctcaagcaatcctcccatctcagccttctaaagttctgggattagcataagctaccatggccagctctttgcccgtatttaaatcagcttctttgtttgcttgattttgagatgtttgagttccttatatatatcttagatagttgcccctattcagatgtatgatttgaaaatatatcctaccattccataggtttttctcttcactctgttgattgttttcttgaatatgcagaagttttttagcttaataaaatcccatgtgtgtatttttggcttttgttccctgtgctttcgaggatttatccataaaatcattgcccagcccaaggtcatggagcttttcacctaagtattctagtagtgttacagtttcagtttacatttaagtctttgatttattttgaattgattctcatcctgtgttctcagtggtggcaaaggttgttagagtcttcagtggtgatgactgctgtggtcctcctgatctcttattctcccaccaaggtagttgtggctgaggggatccctcttggcagtaggtccggcgtgcaagtccacttgcagtagtggtgttaccagtgtgtgatgagtagcatgtatggagtggtcacacagctacagtctgaactatggtataagtagaggaaactatggctcggatctgcagtgataatagccctggtgtccagggtacacgcagccccactgccatgttcgtaactatatgtgatgtgcatatgcttatgaagcagccagggagccaagagcaggagcatagttatgtgcagagttacagtgactctggtgttggggtggattttagttcttcacagtagctgagctggtgcctggagcacaggcatgctcagagagaccttggtttcaggcctgggttgataactagctccctcaccatattgatggctctggtttcagaaatgtgggtgtttgccgagcccaggtctggagtgtaagcactcaagaggtagccacggctttgggattgggcccaagtggggctgggagagatggcagctccttacccaaagtgaggctgaacagtgtctgcttcttagggagtttggaaaagatgcctgaggttccttggcaggaatagctgttggttaacttagtggcagaagatgctggtgtcttttgcagagcaggctgccaagaactatggtggtacctgctgtgtggctgacaccaatagcctctgactttcttctttcttcctatccattttctagcatctcaggtatgccaatatagccagaaatcatatctatgtagatattctctggtgatttgctccactgtgtgtgttacagaagattctttaataggactttgagctctctcaaggttattttggtttgaggatagctctgtgtgtgtttatgtgtgtatgtacgtgtgtgtgtgtgtgtgtgtgtgtgtgtgtgtgtatttaagggggttgaaggttggtatctcctactctgccatcttggtgatgttatacctccttctgtttcaaaatgcatatatattgtttgatcctaatgggatcagtgtttcattccacaagaatgtctaaccttctcaatgttatgtgtttgaaaagaaattatcaatttgttttttgactactattttttgagcccctaaccaatcaaagtgatttataagtcaattcatttaatctaaaaaaaactcataagtattattatgtgtattttacttcagagtaaagcaagtcttaaaggagttaacaacttacctagtattatcaactatggggaggagagccaaattctaaacaagggatttcagacttgaaaatacatccttttaatcctctccttatgaaaatgctgggtgtctaattcagaccctgaagtccacaactgcaaatgaggttcttctatccacaaagtgatagacattaacagaacaacaaacttcaataattcagaatatgtgtactgtccaggctgcctcgtatattcttttcatatcaaaactattaagatttatgatctgttagcttccatcttctctattcttcaaaaacactccattgttatgatgttttccatgcattacttgccctaggtctcctgataacaaagtaatatctcatattgccttgttccaaccatataaaggtttctggcccataagaagtgcttagtaaatattgctatttgtttatctgattcttcatctggcagcttgcaattatttttattatttcatttccaaaatatcctgtcaataattgaattaatgtttatgtctctgttcctatttccattgtgtcaggaattaaatgttttaatacaaatggactcgtttattactgtgagttccaacgggagggaactttcagactgatagtgttgaagttgagtgcgctccttaaggcaggctgatataattactatcctcgtaggtcattgttgcactattattgttttctatttcctgtagactccccaagagaatttcagatgtccatgtggtaagttgaccttaagtgtacaaattctcactattatttttctgagttcaaaaatgtaaacactgtgtagatactttttattaaattgattttatagcaaacagtataatagtaagtagaatcatggaggcaacttttctaaaacaatgttttattactcatgattctgttttttcacacacataacataatgtgcacgactgtcactgagactccaaaacactgatctaataaaaagtttaacaaataataagatcaagacatttgaagcatgttgtttaactttattgattcactgaaatagcagccaccactgccctcacattatagatccaatgaaactaatggcatatccatgaaaggtttaaaccccctcccttagtgatttgaaaaacaaaaaaatacatacagaatatgtaatactctattttagtaccttataatcacaaaaaatcatagcatttttctttcagaaataacttataaaatagtgaaaaataattaggtaatacaactaatttatcctagctgccaaactgtcctttagcctatatagtaataaatttggaattaaatgctgaacttcaagacgtagtactaaatattttaggaccatatcagctgatcacgagctcaaatgcatacggtgttaaatcataataaatatgatcactttaaagtgtacgtatactttagttttaatagcagaaacaaaaataacctattgaatataatcatttttttctaacattccagaatttacatggcaaagaaagtactttgtaattttgcttgaaatgtccagtaaatcagaagagaatgactgaataagcacatttatgtgtgtacgtgtgtatgttaaaaatataaatcaactattcttaagaataccaaagtatgagaacagaacactatattacaatttgataaaaatctttatcacttaataatacataccaacttgaactcgtgctacattataatttttttcattcatcaaatgactaaccaatatgtcattaaataaagaacctaatgttctatgtatcttcatttaaaataaacataaaaatatgttaaaggaatagttgttcaaagcataaaatttatttgaaatgcaaaattgaacaaataaacttcttacttttgtggatgaattcactgcttaccagaattcaatcaattgaatacatttaccttacaaaagaaatgctctagtaaacagtgaatggctcattttaacattgtaaaggttacaaaagtcaccatgctgtgctacagagaaacatttaatacagtgaaaaagaaaaaacagaaatcatctttaccaacaattactacacttttcattgcaatgtcagaggggttttttgaaataacttttttttaaatagggtaaatgcttatccctactgaggttaggcagtgcactggagtgttacataaagaaaatctattggccttttagttgtggaaatgggctctatattccagagaaatgcagctgtaaaatactaaaagtaaactgaactaaaggaatttcttccgacaacccatgtcaaacaagtaagaggcatatttaattgctgtttgaatcatttataactattgtcatgatgtaatgtatcctggcaattacagccagcttttttcattaggttttcagacttaatttcagaaaatgaattcatatttaaagcacagagcacctggtctatgactaagcattgcatcaatacaaacaattggactgtttgatgagaggaacatgcttctggatttagttggcattttgtgactacggctgctaattgctaaatggcttggctggtttgacaaactgacaatgatccatgtatttaaactctctttttagctctgtagatcttgctctgtattgcgtgtgagttttcagagttgttccaaagcccaaataacagaaatttatagtaatttagaatagttttagaaacaaaatgtgagttttcaaagttgttgcaaagcccaaacaaattagaaatttgcagagtaatttagaatagttttaggaacaatagtgtctaaggttcaggctgtaaactaattggttcatatctttgtaaggacttcagagggcaaaaattaggatcagaaattcaaagtgaaagtatcttcagaaagtcttaaaaataacaggaatattattattagatggttacgttaatggtatatgcgatttgtttatcaacaagttctatgtttatgtttcaacatatgtaattcagtcttcccaagaaaaaaaatatttacttttacatagatatattgattaaaggaattacacatttatgtttctaaaacactttcttacctataatctcatttaatatctacaacagcataaagtaaatattgttgttattagtattctatttatagattaggcatagaaaaagatattttaaatgtcctcctgaactgttcctttatttatttcccttcttctctatgtttagtttgagggtccatagcatctacatctctgggaagcttgtaagaaatgcagaatattgggctctatcaaataactactgcattagaatctgaatttttaataagactcctaagtggttcatatagacattaaagtttgaatagcagtgatgtaaattacataaaggtaatcttttagtggtttgaaaataaatattggcctctgatattaaaccttcatcctatgcacgatggcacagagcagatctcattcacaacatataaatacccatattttttcctggacatataactgggtcacatttctatactgtgattagcatatcaggagacacattaataattagtattcccttaactacgtaatccagaagagaatataaaaccatatcaagttacatgaaaaacagggctactaaattaagtggtttaaaagtggtaaaaaaaaattaaggactactgtgtgctaagccagcttaccacgccttggttattgatttgcaatttttactatttgaaccagcctggtaagacagaacgttcacacaccaggttaagcgaaacaactttattactcacagataggtaacaagtggcaatggaagcctaggatttatggcaagctgatcctgcaaggctcaggagaacttcccagggtaaatggactcttgtctgcatgtgctccatgttgtaccacagctaagagaccccaaaagcaatgagctgtgggttttatgcccaggggtcactgaattcattgagctacagtgttgagctgtatcccgttctaaggacagaacagagcccaggctgttccaaatagttcctccgtacatccggatgtcgcattcctagaacactctacattattctgagaagtacaaacaagaaaggaggggaaagagctaggctggttgtggccatctgggaacctgtcctgcatgaagaaaaacacacacacacacatacacacacaaaaaaaaacaaaagagagagagagagaaagagaaattacaatcagctgaattagacaaaaattgttaagaaagcttaatttgaatttgaaattgaagataaatacaatgtcaacagatacctaagaagtgtttcctagggtgtaagcaaaagtccagatgtaagggaaaggtatttttgttttgctttttttcccttgggtgaataagtagtctgttagctcaactatgttacacaatggaaagttaagaaattcgactggtacgccgggcacggtggctcacgcctgtaatcccagcactttgggaggctgaggtgggtggatcacaaggtcaggagttccagaccagcctggccaagatggtgaaaccccgtctctactaaaaatacaaaaattagccaggcactgtggcaggcacctgtaatccgagctactcgggagactgaggtggataattgcttgaacccgggaggcagaggttgcagtgagccaagatgttgccactgcactccagcctgggagacggagtgagactctgtctcaaaaataaaataaaataaaaagaaatacaactgacaaagtaaatggggtgatatttgattaagagtctggaaatctccttaaggtgtttccactttattaggtatcgtgattctttaatgattttcattaagagaccgatgtgattgtaacaaggttttcacaagatctgtgcattgtttgtaaaaagaatgctacaaaggatagagaaaatgttgaggaaacagctttctcttgaatcatccaggatatgaatggggatagtggtagtaagagtagatgaaaagattattagaaataaatgttggaaatggagaactacaatattgagtgccagttgggtgagataaatgaagaagaacaccgaataaaagttaattaagtgggttttaattttgcttgagagataatgggcaaggcatgaacagaaattaacaaatcagaaaaaaatcagtttgggacatattgatataaattggtcagctttaggatatttagtgtgtctatgtttctatgataatgaatgagaggagaaaaacatatcatttatgtatctgagagttatcaataaaaaaaaatttagctgttggccaggtgcggtggttcacgcttgtaatcccagcactttgggagcccaaggcgggcagagcacgaggtcaggagatcaagaccagcctggccaacatggtgaaaccccgtctctactaaaaatacaaaaatttgccatgcgtggtggcatgcgcttgtagtcccagctactcgggaggctgaggcaggagaattgcttgaaaccgggaggcggaggctataatgagaggagatcgcaccactgcactctagcctgggcaacagcgcaagactccatctcaaaaaaaaaaaacaaaaacaaaaaattagctgtaactgtggaagtggatgacattctagtgaaaccaaagggacaggagggtaaggatacattttagtcttctttacccttttctggctatgatgctatcagcatcccagtcaaaaatcttactgattttgaaatttattacatctaattatggcatccttttttttttcacagttaaacaagttgttaaaagctggctttcctcactctaataaatgtaacaaaacagcaagggccactgccacatccattctttcttctctcctaagtatagaacttgctttccctttggcattaatagcctccccctacacccccgcaaaaatttctgcaactttctttgcagcagctagtgtcatgtaacacaattttttaccaataagataaaggaagatgttcctgggagccttttaaggggaatgtattgatttgacatgagcctcatttgtgttttaccatctttcttacgaaatatcaactttatggctggatttctggctgccacctttcaaatataaaaatgaggatataacaaatgaacagatgcaaatgatggtaaaagggactgatttgctttgaaagtatcttgatgccacagcatccatcctagatttcctttttaaaatttttctaaatatgctttttggttacatgtatgtttcctttagaaaagcgtctgttcatgtcctttgcccattttggatttttttattgtaaatttgtttaagttccttataaatgctagacactagactttgttatatacaaagattgcaaatattttctcccatgctgtaggttgtctgtttactctgtcaatagttttcttttgctgtgcagaagctcttaagtttaattagaacccatttgttgatttttgcttttgttgcaattgctcttggcatcttcatcatgagatttttgcacattgctatgtcctgaattgtattgcttaggttgtcttctaccgtttttatagctttgggtgttatagtttttaatccatcttgagttgatttttgtatatggtgtaaggaagggtccagtttcaattttctgcatatggctagccagtcacccaagcaccatttcttcaacagaaacttttttctgcattgcttgtttttgtcagctttgttgaagagcagatggttgtaggtgggcagccttatttccgggctctgtattctgttccattgttctatgtgtctgtttatgtgccagtacaatgctgtttttgttactgtagccctgtagtataatttgaagtctgataacattaagtttcagaagaaaagctcaatatcactgatcattagagaaatgcaaatcaaaaccacagtgagataccatctcataccagtcacaatggctattattaaaaagaacagatactggcgaggttacagagaaaagggaacacttgtacactgttgatgagagttttcataagttcaaacattgtggaaagcagtgtggcaattaatcaaagggctaaaaacagaaaattcgacctagcaatcccattactgagtatatacccaaaggaatataaatcattcttccataaagacacacacacgcatatgttcattgcagcactattcaaaataacaaaggtgtggaatcaacctaatgccatcagtgctgattggataaagaaaacgtgggacatatgcaccatggactacttcacaaccatagaaaagaaggagatcatgtcctatgcaggaacatggatggagctggaggtcattatccttagcaaactaatgtggaaacaggaaaccaaataatgcatgttttcacttataagtgggagctaaatgatgagaacacttggatacaaagagggaacaacagccactgaggccaacttgaggacagagagtgggaggaaggtgaggatcagaaaaatactaggcttaatactcaagtgatgaaataatctgtaaaacaaacccccataacatgcatttacctgtataacaaatctgcatatgtattcttgaacctaaaataaaagtaaaaaaaaaatgaagttcctacaaataaaacaatttttaaacatggatggaaatggaggccattatccattgcagactaatgcaagaacagaaaaccaaatatctcatgttctcacttataagtgggagctacatgatgagaacacatggacacgtagagggaaaaaacacacacaggggcctattggcaggtggaaggtgggaggagggagaggatcaggaaaataactaatgggtactgactttaaacttgggtgatgaaataatctgtacaacaaatccccatgacaaatgtttacctatgtaacaaatctgtgcttgtacacctgaacttaaaagttaaaacaattatgtaaaccactgttttctcttagctaagttcaattcctaattgataaaattaactcaatgtgtttttgaccctatcttagtcaatctgaatatgcagactctatatcattatgggcaatgtgtacatttcaagggaaaggaatgttggtgtaccacactgagctgcataatcaatgtggcttaacaatgtgttaaactaggtgtagattttaaagaaaggtgtggtttttagatgacaggtgtatttatgacggtagtattacttcagtttctgttccaattgtcttatgttggtaggagcaaacatgaattccatcctagcaaccacagcatcaattacaggtaccagctgagaaagcataacaacctaaagttccttgattttatattcctatcatgctgggctactgtgctgtgaaatgcatgcagatctattagggggtgataaaaagcaacatgattaacaggtgatttatatcctttgagattgacggcatatagagaatagtgacaaatgggggatctagttggattgagacagattatattaaaaataaaaagcctgattacttatcttgtgtaattcatcattcttaccttcatcagttatctccccttctccctgcacagtaaccagcgatgctaactcccaccctcactcccaaaaaagtacatgcttgacttacgtgacttatactattagagaaaattcaggttttactgttcaggaacatgtaaaagtccccaaattatactctgcaaatgatgatattataaaaatattcaaattgtatgggggaatttaaaaagtccaactcatattgcaagtgcatttgccttatccattcaaaaccccagtcaaacataactaggagctgatatatcaatgcttcatacaatccaggtgaaaaaattatctgacttttatttaaaaatgtgcaaaaataataaaattcagatttttgaacaccatactagaccgactgtatcagcatatttagaggtggtaactaaacattttaaattaaagtaaaacaaaatgaagactcttttagttggtcttggatttttagaaacaataatagctatgtaataaacttttttagtatttcaaaatttgggcacctttgcattttcaccattacataaaaattcattagtttaatattgtcatgaagtcttttccaaatacttcaaaatcttattttaaaactaagtaattttgcaataattaacactcttcagtctcatatagtaaaactcgtgagcataattatcagcatcagcaatttctaaaaatttgttaagcttacttttaagcatctgatcaattcagcatattctcttcaaacattccaagcaaattgatttttactatttttttaataaatggtattcaaaattttaagattgtatttaaattgtcagaaatgagggcaataatgcaaactctcaaaggatatagaatctcataagcacaaatgaatctattttaatgatggttagttggtggaggcttcagatgatttcagttgtgttgttatctctgttgtctgcatgacctaatagcagaagaacttcactgtgagagaagaaaagaaggaaggaaagaaggaaggcagagaaaggaagaaagagagaaagaaagaaagagagagagcgaaaaaagaagaaaaaaagaagcaaaagaaagaaagagaaagaaaaagaaagaaagaaaggaaagaaaaggaaggaaagaaagaaaagaaagaaaaagaaagaaagaaaaagagaaagaaagaaaaagagaagagagaaataaagagagaaaggaaggaagggaaagaaagaaaagaaaagaaagaaaacttatgacctaaggaacatgctttctgactgggaattggattccacaactcaaccgcatcatctgcctgctggtcatcagaacccacaggagttgggtaaagaaaataactcaccatcctcgatataaacctaagaatttatgtgtattcctcagagatgcacctgcagagtgggttggaacatttacaattcataacatgccattgttcatactggtaatcaaaccagtttaactgctgaagaacaagatcaccacaatcattatcaaagatgcaaataaacagaaaattagaatgacagtaatactctgtcaagaggttctatggtaatatgatttgttgtaatacagcaattcctgtatcacatcttgtgatgttttcatgaaccagtttctaaaaagaatttaatatgcaaatatgccagcagaattgagaatacagcacatacctagtgtttaattttaaatatgcatgaagcataatatcttcatgtttaattctgttataattttgggggtttatatttccacattcaatttttatgtttcttctttttgttattaacatacagatacgagagcaatttcctgaagaataactttcaaggcttctcccttgacaaagataaagttgttattacagggcatgactaaagtaatctcctttctgttgattcactagcacacaatgtgattttctcttaaaatttttatcaagattatttatgcacaatacgggcttaacaacccatagtgataagtgaaaatacaaaagtgcattttaccatgaacatataaaggtgttaaacttatttcaaggtacatcaataatttatttaaggcaatcttcataaagttaggacactagttttgtttttattgttctgcaaaactgcttgtctaaaactcatttttaaaagataatgtaggagttttaatggaaacatacaagtggattatttaatttatttttaattagtgtacttactattctcatgtcttatgatgtagattaatctttctctttatatatacctgatacatgtttcctgagtaaacttacagagattatttacgctctggtgtatgttgccacacacgggtgtaggaaaatattcttgatcactctattattttgttaatgattataatataaatggtcattaactttggtaccgaacactaggttaatgatgttcagatattccttttatagttccagttcaaagtctagtttataagaaaagagttttaacataaacaaggtcattgaagtcagtgcttcttggtgatgaaattgagattaaatcatgctatttacacatcaaaagcctgattaacataaaatgcctgtaacaattacacagcccaggcacacagatcaactcatgaatcaacataaactacttttatcagaaccactaacattttaggagttgtgaatttatcactgatttacttttttaagaaatttcaagtatgacagtcaaaaacccttaaatttctaatttacaaggcagttgaacatagtcactagaaattaagagcaaatgcatcaaacttctctgtctaccacaaatacattcttcttccttttatatatgtactctttagggtcaccagtggagtcttctcaattcccagtccccttctgtgaaatcaaaaccttccttcctattcggagtatcagtgacaattttatctctatcctctatttaacctctctcacattgtagctagtgcagacctgttttttttcctaagctatagtaaagttgtttgtactttcactttgccacagaatttacacttgcactgttattaccaactactctaaaaatagaattgagaacctgctatgagtcagaggttttaggtcatttcccatcctctaacggtgtcctgttttagcctaggaatgggaaaatggaatagtggatattatcagcttctaatctctaacttagatattctcacctctcaaaacacacacacacacacacttacaattggtcccatttctccatggttgggtccaaggaagtaacattagagaaattcctcatgaccacacgggaggcatatgtgggatctgtcattggcctggtgggtgattagagctgtttctttctctcacatacacttttatggctttcacagatgtcccatcccctgaacgttcaacagatagcctcttggtaagaaagctgtttttgttttttcggggtaaacggattacaatctctttctataaatattctttctaatacagtcagcttgcacagcaaactcatagagctctcccctactcccaaacaacctcccctcacctcttaattcttactaacttttgctgaggtgatgggataagggtactagcgctggtttgtagcatgtatttgcaagtcctgtatcagttcattccttaggcaacactgggcatttgttcactgccaggaagtattctgaccactgaaaatgaacaaaagaaaaaaatctgccatcattgggcttaaaaacttttttaaaagactcacatatataatgatgtacatgatgctaattgctaaggaagaaaaataagtagaaaaggcaatatgaagtatgtatgtgttggtagatggagttgaacttttaaacagcatttccagagcaagtctccctgagagagtgaatttgactggagatctaaagaggagataggggataatatttccagaaaaagtgatcaacctgttcaaagggccacgaagcaagagcacacctagatgtctaagaagcatgcagaatccacagccaagagagtagaatgaaatgggttaaggcggcaaagagaggtaaagtggggaggaccaagaagtgccatgtgccactcataggacttgtgggttctaagcactcttggatttttaccctaaggagataagaggccaccggagggttttgagcaagggatgggaataaacttgtttgttatgccttattttggtcactatgattgctgtgctaaaactactgtgaaaagggcaagggcaggaatatggaaatcagttactagattcttgcaattacctggcaagaggtaatgtgacttgtaccaggatggtggcaatgcagttgttgagaagtcaagtttggtatgtatctagaaagtaaagtcaatcttattcactggaaactagatgtgggtgagaaagagaagagtcaaggaaaccaagttttgtggctttagcaaatagaataagggggcaaaatctcaggagctgagatgttaagattacgggagcaggcttaagagtaggaggggtgggatcatatgaatttttagatgtggattatggtcgtatctacaggtgtcaggtaagatgttaaatacatgaacctggaagtcagtagataagtcatcacctcaatttttttccaccaaatgtttgatttccaacatatggattgcaacaaaaatagagagcagtcattgtacatattctaatctaatgccttgtaccatgtacattgtctcatttgattgaaaactaaaagaattccacggctattatttccccaatgtaacaagttaggagaaggagactaaattttatagttattttgtcattttagataatagataaaatcacttactgtatgtttctgagaacattaatggttaaaaatcaaggttctagttagagcaactcatgccattttgaagatcaaaaagtcttttaaagaacacaacttatgttctagcttttctcttaaatgagatatcttttctttgtctgggccccaagtgcctctacatttctaagatgtatgatatacatttgtctgtgtttccagatttcccagacttcatgacaccctgttcacacaaatacaaaagctcaaagtcagacaactcttatcttgattcctcaaaatcatctacaaagaacctcttcagaggagggtgttttggcttctccagagtgcttaggagcttctagattttggaagacgctctgacccactcattcatagaacaactttcatgggaagggcagaggagcacagaggccaagacacaccctaccctctggagaagtggacacaggtttgaggtctgaggacaagtagcatgaccacatcagaatttacaaacacagcgatgtgccagccccatcaatcattttagacttaatttatttaacaagtacttattgaatgccttccaggaaataagacttgtgctaagctagcagtttttgaaatggtccagggaccccaggagtgtctaagatgctttcagggggttcatgagattaagactattccatggtaatattaagaagtcattttggcacacacctgtaatcccagcactttgggaagccgaggcaggcggatcacgaggtcaggagatccaggccatcctggccaacatggtgaaaccccgtctctactaaaaatacaaaacaaaattagccgggcgtggtggcgggcgcctgtagtcccagctactcgggaggctgaggcaggagaatggcgtgaacccgggaggcggagcttgcggtgagccgagatcgtgccactgcactccagcctgggcgacagagtgaaactccgtcacaacaacaacaacaacaacaacaacaacaacaacaacaaaagaagtcatttgccctttttgctaagaaatttcactttcatatgaaccatgacactgatttaacaacttctcccaaatgacacggatcttttaattattttttttccttgggagttatatttttaaatttattttgtatactataagacatatattcaataaaatcttccctactttaaattgtatattaataattaataagctttggattccaaaaaacaaccttcaaagtataatagattatatatataccacgtgcttcctgatgttaagtgaaggaaatgcttattctgcagctgggctttgtggggctggcttggaccaaagttttcgtgtctccctctttccaggaaccaggatgaaggagcggctactatattgagcaaagtactgtcctagttgagggcagaagctggaaggggagaaggatgaggaaaggatcctaactatacagtgcacttaaagttccaatttgaatgtggtttatgatgtgtctgtttacattcagttgagagaataaaatccaattcatatttatctcttggtctaaaatgcaaatgaataagttaaaaagcaattatatttcagtcacacatattccatttatactgaatgagtcagctgaggtttacatccattctatattcttcagcagttgctttagtcgtttttatggtatgaccctgtatttatgtcccgccagatagcgctttttctagatgtgatgatccttggcacgttgtcagctgaggaatactgtcatgtattcctggttgccaagaggttttttcacaaacagaaagggccacagaatccaaaaaagcaaataagctattgaagtttataacataaagtaagttaaacaaattggatatgaacttctcacagaagaaatctcttgattttttatatagatgtgtacaatagtttctcacccttctgagagagattctaaaacttttcatctctgagataaagaaaaaaaacaaatcatgccagggaatgaaaccatgcttttaaagtcagcatgattacatttttttaaggtactactgtgagggggaaaagtcattggaacaagaagcagaacttgattttttggatgtgcaggaagggaattctttctgtttcaaagttaaatcaggaaagataagctgagaatactttgctttgctctataatttaggtataaccagatttactcaaaaattaggcggggatattttttgagggagtaaagaaaattgtacttggtgattaattaatataatccaattgtatattacttcatttcaaaattatttaagaagcatgttataccatcaaagtctccatccaaaatacatttaaccagtggttactcagcctccccaaccctaagttcactttaaagtaggttttatctgagatccaggacacatattctggatatgtgtatctgtatgtacacatacacatgcatacattaatgtatgtgcatattcaaagatgcttacatacatgtcatacacatgtgacatacatatgcatatatgtcatatatacttacatgcatgaaacaaacatttcatgaaactgtaattactatgttttactctgttatttctgttctgtttaattttttaaaattacatagtaaatatattttatgactcaccaattcgcaaagcactgttttaaaccgtttgtttcaccttttggttataaataaagacacacacaaaaactgctttagagagaatacaaatgtattaattaatatttgatatctcaggaagggccagagaatcagttttggagtttacacaaccagagcttacactcaaaccatacgatggaacaactgttcataggacccttcatggctgttgctgggcacaaccgctgtttgtgtcacagacactggacactgtaagctgcctttgaaagatctggctctgctgacactgaagacacataggagggcaccatttcttgatatctcaagtttatgaataaaggctcgagcaatatttctgatcgttggggcttgtattagcttcagctgccaaaacaacatactacacactgagcaacttatacaacagatatttaatttttcacagttttaggaggtggaagtaaaaaattcaggtgcctgcaaggctagtctgatgagatctctcttccaggcgtgcaggcggccaccttctctctgtgtcctcacatggcctttcttctacgagtatgctgagtaaggaagagagctctggtgactcttcttacaaagacactagtcctatggagtgaaggcccaaccttcatgatcttatttaaccttaattatctccttaaggggcatacatccaaatacagtcatattggcagttagggcttcggcatatgaatcttagagggacacaattcagtctataacaaggctcatgtcacatgtctgaatattgcctgatgcaagcctcagaagatgattttctggtgagtttctacctgggtgaggcacatactatcaatatggtcagtttcacaaacataggaaacatatataaaccttttggaccaccaaaaagtgtgataaatgtcatctgcactgtaaaacaaggaaaatctgccccatatttataaatcttcacagtaaaagattttccaatttggaaatctacaacaataagaaaaccacaaattaattgaaaaatataatatagcacacattatcgatttgactaaaagatttaatcctgtgtacactgttacatatttttcatagatattttcaataattcattctagttaatgctttatttaaaacaatgggagacagtctaatttgacgtatgataaagaatatattctcctgatgacatgtattatgtcaccctaaattacttaagacatctgccaaatcaataataattcagttaatctggcaaacacataacaaataaaaacaattatacacttgaaaattatgttgactccttttcctttttataaataacaaattaaattctctgttaagacatttgtttaacactgatagtcttaatgcaagttacttttacagataacatggtaatattttcaaaaaattggaaaatggtgtcgtaaattacacattattattatagagcctcaacatcacttggtgatttataaaattgaccttgtcaatattcataaaagtggtgtaaattatgtctgataaaaacataacaatccacataagcctgatgtttagcttctcatatgcatgacataggcttgattaggagagcaattttgtcacttttttttaaattaatttttatgggtacatagtagatgtatatgcttatgggatatatgagatattatgatataggcatacaatgtgtaataatcacctcagtgtaagtggagtgtccatcacctcaagcatgtatcatttctttgtactacaaatgttctaattatacacttttatttttaaatgtacaataaattatttctgactacagtcatcctgttgtgctatcaaatactggatcttgttaattctatcaactatacttttgtacccattaaccatccccattcctcactcccctctacccctcccagcctctggtaactatcattctactttctacctccacgaattcaattgttttaattttaacacccacagatgagtgagaacatgtgaagtttgtctttctgtccctggcttatttcacttaaatcatgtcctccatttccatccatgttgttggaaatgacaggattgcattctgttttatgactgaatactatttcattgtatatatgttccacgttttctttgtacatttgtctgttgatggacacaggttgattccaaatcttggctattgtgaatagtgctgcaataaacacgggagagcagttatcttttcaatacactgatttcttttcttttgggtgtatgcctagcggtgggacttccgggttacaaaatagtgctatttttatttttctgaggaacctccatactcttctccatgcagatatactaatttacgttcccaccaagtttatgagagttctcatttcttcatattctcaccagcatttgttattgctagtcttctggataaaagccattttaactggagtgcagtatatgtcattgtagttttgatttgcatttatctgataagcaatgattttgagcaccaactcatgtacttgtttgccatttgtatgtctttttttttttttgagacggagccacactctgtcgcctaggctggagtgcagcgaacatcatctgtcttggctcactgcaacctccgtctcccaggttcaagcgattctcctgcctcagcctccccagtagctgggattataggcacacgccaccatgtccagctaattttttgtactttttagtagagacaagatttcaccaggttggccaggctgttctcgaactcttgacctcaggtaatccaccagcctctgcctcccaaagtgctgggattacaggtgtgagccaccgtgcccggccagtatgccttcttttgagaaatgtcaattcagaacttttgcacattttaaatcagattattagatttgtttttcctatagagtttttgagctccttacatattatggttattaatcccttgtcaaatggatagttggcaaatatcttctcccattctgtgtgctgtctcttcactttgttgtttgtttcctttgctgtgcagaaactttttaacttgatgttattccatttgttcatttttgctttgttttcctgtgctgttggagtaatactcaataaatctttgccgagactaatgtcctcgagggtttacctagtgttttattttaatagtttcatagtttgagggcttagatttaaatctttgatctggatttagtttttgcatatggtgagagatagggtctagtttcattcttctgcatatggatattcagtttttccagcgccatttattgaagagactgttctttacacaaactatattcttgacagcttcataagaaacaagttcactgtagatgtatggatttagttctgagttttctatttttttctgttggtctatgtgtctgtttttatgccactactacactgtttacttacaataggtctacagcataatatgaaaccaggtaatgtgattcctcctgtcttgttctttttgctgaggatggcttttgctattttgggtcttttttgggtcttaaaatttccacgtaaattttaagattttttttttaatttttgtgagaatgtcattggtattttgataaggattgcattaaatctgtagcttgctttgggtagtatggacattttagcaataattcattcttctaatccatgaaaatgaaatatcttttatttttttgtgtgtcctcttcaactttttgtatcaatgttttatagctcttattgcagagatcttgtacttctttggttaattcctaggtattttattttatctgcagtgtttgtaaatgagattactttcttgattacttttcagaatgttcgctattggcatatagagatgctactgatttttgtatgttgattgtttgtcctaaaaccacaaacctaaaacctaaaaccacctctaaggtaaaatacttgtgttaaaaaaaaaaaggaaagcggggtacagtgtacatcacacacaaggcccagcaatctcttgcacgtaacatttactactttgaccacgtcaaccttatctatcaaagtagccatccattaattccttcccacactccctttttcttttccagttctaacttcttattgaaataagtataatttcacatgccaataaacatgaatatgtttatcagttctaatagattttttttgtggaatctttaggtttttctaatatagaatcatataatcttcaaacaaggacagttttacttcttccttcccaatttggatgccttttatttttttcttttggctgattgctgtagctaggacttccattgctattttgaaaaatcgtggtgaacgtgggcatccttgtcatattccggatattagagcaaaggctttctgttttccctcattcagtatgatatgagctgtgtctgttgtacatggcctttatattgttgaggtatgttccttctatacccaggtttttgaaggtttttatgataaaaggatactgaataatatcaaatgcttttttagtgtcagttgaaataatcatatggttattttccttcattctgttgatacactgtatcacattgatttatttgtggatatggaatcatccttgcatccctaggatgaattccacttagtcataatgactagtctttttactgtgttgttgaattcagtttgctagtattttgtggaggatttttgcgtcagtgttcatgaggaatattggcctttagttattttgttgttgttttggggttttttttttttttttttgatatgtctttgtttggttttggtatcagaataatactggcctcatagcttgattttggaagtactccctcctcctttatttttcaaaatagtttgagtagggttggtattagttttcatttaaatgtttgctaaaattcagcagtgaagccatcaggtcctgggctttttttatcaaaaaactttttattatggcttcaatctctttagtttttttggtctgttcaggttttggatttcttcatgattcaatcttatccatgtctaggaatttatccatttcttctagattttccaatttattggcatatagtgcctcctagtactccaaagattctttgaatttctgtagtatcgactgtaatgtctcctttttcatgtatgattttatttatttggatcttctttctgatttttaatttggctaaaggtttgtcaacatagtttatcttttcaaaaagccaaattttcatttcatttatcttgtgtatattttatttcaatttctttattactgttctgttcttcattatttcttttcttttactaactctgtcttgaaatgtatttgtctgacataaatatacagctactcctgctcttgtttggtttctatttgcatggaatatccttttccttccctttattttcagtctgtgtgtgtctgtataggcaaaatgtgttttttgtaggcaacaaaaaatagcaagatttggatcttgctattttatccattaagctactctatatcttcagattggcgagtttagtccatttacatttaatgttattattaataactaataactcactactgccattttgttatttgttttctggttgttttgtggtgttctgttccttccttttttccttcctgtattcctatcagtaaacatgattttctttggggtatgtttcaatttttgattattattattattattattattattatttgagttattttgagacagggttttcctctgctgtccaggctggagtgcagtggcacaatcatggctcactgcaaccttgacctcctgggttcaagggatcctccctcctcagcctcccaaatagctaggactacaggcaagtaccaccacgcccagctaatttttaaatgttccatagaaacagggtctccctatgtttcccaggctgttctgaaacttatgggtctaagcagtcctcctgccttggcctcccaaagtgttgagattataggcatgagccactgtgcccagactttaaaaaatattttgtatatctgttgtatctttctgacttgtgggtaccatgaggcttgcaaataacatcttatgatctgttattttaaactgatgacatcttaactctgattgcaaaaacaaacaaacaaagaagcaaagggaaaactaatacaaactcttcactttacccttatccccctgatttttaactttttgttgttagttataatgtctgccttgaaaaattgttgtagtcatttttaatagttaatcttttatctttctaattaagatataagtaccttacccaccacaattacagtgttataatattctatgtttgtctgcatacttactattatcagtgactttggggccttaagatgatttcttattgctctttgaagttattttctttcagactgaagaattccttttaatatttcttgtagaaaaggactgatattgaggaaaattcctcgggttttgtttgtctgggagtctttatttcttcttcatgtttgaaggatattttcatgagatatactattctaggttaaaagttttttgtttttttccatcagcactttaaatatattatgctactctctcctggcctgtaagcttccattgagaagttggctgccagatgtttgcagactcatagaggcaacaccttaatggtcttcggtacaatccagaataattatctggattaccagcaagagtcttgttctcttccctttctttcccccaaacaaataagagtctttctttctgtgttaagctctctggagctggtggaggggtgacacaagtactcctgttgccaccaccacttggagtgtgctaggtcagactcaaatccagcacagcactggatcacaccccaggcctgtggcaagtactgcctggctaccactgatattcactcaaggtccaagagtgatcttgtggtgaatgacgtcaggcctggatctttcaatttaatgcagcagcctccgctctggcccaaggtggatccagaaatgctgatgaggggccaaggcctgaaattggtgtccctaggagagcccactcgttgctccatcactctatcatcaagcttgtactcaagctgtaagacaaagtctcatttactcttccctctcctttcctcaagcaggagtctctccccatggctaccacatctggaaatgctctgggtcacccccaaatccagttctatactgggtgtcacccaaggcccacagtgaatactacctgattaccactaaggtgtattcaaggcccaagggctctttaggcagtaggtgatgaatcctgtcaagactgggcccttcccttcaaggtgtgggttcctttctgggccagggtgtgtctacaattgttatctgggagctagggcctagaatgaggtgccctattctactgtgtctgagctggtctataacttgaaagacaaagtccttcttactctatcctgttttctccacacatagatgaaaggagtctttcctggagctaggagttccaatgcctggggttggaggaggggtggcacaagcactcccctggactctggctgaagtctcactaggtcatgtgtacctcacatctgctggctctgagcccagcacagcaccaggacttgcccaggaattgcagtccttgtggcctagagcatctttcaagtttatttaggaccccagggtacttcagctcatgaaggttgggctagctgtaactcaggttccaaatgctaggatggatgattaccctctggctagggctggtctaaatgctcactccctgtgtgtcaaccgaatttgccctgtgttgctttccgcagtgacagaacagcactgagttccaatgcagaggcccgcgctcactatgctgtcttttccccaagcacacagattctctttctgcaccacgtggccactgctggcggatgagggagggatggggtaggcagttcaagactgtctctcctacactctttagtgcctctttccttgatatcatgttaaatttcggcactgtgattgttacttgatttttggttcttataaaggcactttcttgtgtggatagttgttcacttcgatgttcctgttgggaggacaattactggagggttctgttcagccatcttgttctctcactctatcttttaaaaccaaatagtaggcctggtgcggtggcttgcgcctgtaatcccagcactttgggaggccgaggcaggcggatcatgaggtcaggagatcgagaccgtcctggctaacacggtgacatctcgtctctactaaacatacaaaaaattagccggtcgtggtggtgggcacctgtagtcccagctgctttggaggctgaggcaggagaatggtgtgaacccagggggcagagcttgcagtgagccgagatcatgccattgcactccagcctgggcgatacagcaagactccatctcaaaaaaataaataaataaaaaataaaaataaataagtaaataaaaccaaagagcatttatttttatgtagcagatacaatactcaaatttaaggttcttccccagatgtaagctcattactagtaaaggaaatttttaaacacagagctccatagagtgctaggtttctttgttggtaaacaagagaataaggatgaaaggaaacattcttggatgcatttttttcatatagccatcttttttctggggtctaagaattactgaacaaggagagacatgataggaatgttgttttccattgacgcatgattggcatgcaatgaccagcagctactggcttatcactgcgtttgcaagcttccttcatggcatggcaaaacaggtttataatcttgactttcagttatttgtcataacttattatattgatacttagcattttgccatcaaagatgggacagagttagcaatagtgcatgccctcacttttgctttataagaaactgggatcatttacaaatctttgataaaaggatactgggatctattttgttcttcctacttcatctaattgcctcataacagacactcaaaatttccagaacttaacccacccagacctgtgctggcccttgcttctactgggttatcagagcaattgttaaattttcaagaattttgtaagctcttcgatgtcacattcacaacttatattggcaatggtgagattatttaaaggatggatattagcaaacaccaacaggagctctccatttcctttttcagaaagccaggtcttccagcacacattgagcctaacacatcatattagatttacaagggatcttttgacacatttatttgacagagagaaatcaaaatgtttgttacttattctactgatgtagttgggtacaggtgtagttattttatctattggcactaaaaattttttctttgttggaaaaatactttgtccaatataaattggagctaccaatttatatttggacaatgagaatcacaatggtctggaaagggataggtgaaatgaagtattactaaactcctgtacttatgccagtgtgacagttactgaaactggagaccgaaagaatggcttgggttaagaggagatgactgtgagggggaaggggtcacaaataatacatgtgagttattattaaggaataagcattttctaacatatcctaagattaatattacactgaaaatgtagagtgtcttttctatccttctgtctcattctgttcctattgtaattattctactactatggttagtagatttattgtctattgagagtaaacagaaattttcaaggcttaataaaatcaaacatatatgtcatatcaaatcaaaacaaatgtgagtatgtctgagagagagaatttcagaagttaatccagtaaaattttgtttgtgttatacaaagtaatgcattgtgtttagggtttttgatttctgatctaatatctgatggttactttactttatctaagtgtttatttatttgataacttggtaaataatatcttcaatatgatctcagaattttaatctataaaatagaattagcaaaaaatacttttgtagcttacattgacatcctaattatatggaaggatactctgaatggtttcattaatatattaagtcttctcagcaaatgcttccccatgatgaaagctgacatttataatcaacctctaatatcacatttctacagacttattcctttgcttacatttattagagtgcatttgaataatttacctcctaatttttcagctaacatctgtgcaaaaaaattttaataagctagaggaaagaaaatagccaccaaaatagattgcctcctttaacacaaaacactgttttagagaagtagcatatgagaaattactgtgaaaaggacataatttcactatttattcagttttaaatactctatgttgtagttcatatataacataaatagctctgtgaaaggaagaaaaactatattttagatacttcagaggttattaggctcagaaaaccctgggaaaatgaacttgaatctatggaaatatttgttaatctcacaaatctaccagttcttttctccactcgaaagttaattcatatacaccatgaaatactatgcaggcataaaaaaagaatgagatcatgtcctttgcagggggagctggagaccataattcttagcaaactaacacagtaacagaaaagcaaatactacatgatctcttataagcgggagctaaatgatgagaacacatggacacaaaaagggaaacaatgaacactggagattactggatggtggagtgtgagaggagggagaggatcagggaaaataactaatgggtactaggcttaatacctgggtgatcaaataatctgtaccacaaagccccatgacttagatttacctatataacaaacctgcacatgtacccctgaacttaaaataaaagttacacaaagagctaagcatcctgggagaaaaaattcaaaatttttgagtaagcttcatacaattttccacagcagctgaaccattttacttcccaatgaatttgccaactcttaccttttgtttccctttataatagccatcctaatagatgagatgacatctcactatggttttgatttgcaattctctaacagttagtgttgttaagcatttctcatataccttttggcaatgtgtatgtcttctttggaaaaatgtctgtcatataatccaacaatcccgcttctgtgtttttatccaaaacaattgaaatcaagatctccaagagatgtctgcattttcatgattattacagcattatttacaatacacatgatatggaaactaatgtccatcaatagataagcaaatatagcaaatgtggcatatacatacaataaaatattatttggccttaaaaataagaaaattctgtcatatatgacaacatggatgaatttggggtacattatgctaggtgaaataagacagtcacagaaggacaaactgcacttttccccttatacgaattatctgtaatagactcatagaaacagaaacgagaatggtgcttgtcaagtgctgagggatgggggaaatggggagttgctgttcaacaggtataaagcttcagttatgcaagatgagtaagttctaaacctctgttcaccatagcacctatagttaatattactgcattgtgtatttaaatttttgttaagactgtagatctcacgctaagtgttccaactacaataaagaagtcaattcacagtgaatatatcattataaatagatatttatattttctctgtgaagcttcatgtaatattaactaacttcttaagaaaatttaatggtcttccagctacctgctctgtcacattcttaagtgctttaattggggatgttacagccaccaccacaatatggaggagctactttcaagtttcatcatatttgcaagttttatattatgtataatttttttaaaagttcactcttctaacaaaataactgtattgagaggatccagtgattatgaaagaaggctcagtcagaaatccttaaactatttttagcaaagatcctctggtatgtagtaacagaatcagggtaatatcaataggaagaatccagtacaacagaaataaatagacattagctgttttctcagtaattatgtaggaaaaagggaccaagactctcagtaatggaggcaatagattttatctttaaaaacaaggaaacttggttgtatattcctaatcttgccttgtaaaactatgtctaccgtgttaatattattaactgattgacttgaatccttgatgatattgtttgtcagtcataattctttgtgttactctcatttcagctaggtattctgatgatgtacagacacatatacccatacacaactcacagcattacggcttactaaatagaactccaagctaataatgcctttgacgttattattgcatacttttccttgttaaaaatattaaggagagaaaaatagtgtgggcagactcgtaattataaagccacagtcggctgggcgcggtggctcacacctgtaatcccagaattttggaaggccgaggtgggcagatcacgaggtcaggggttcaagaccagcctggccaacatggtgaaacctcatctctactaaaaataaaaaaattagccaggcattgtgccaggcacctgtaatcccagctactacatcaggtaaactcaggaggctgaggcaggagaatcacttgaaaccagaaggcagaggctgcagtgagctaagatcgcgccactgcactccagcctgggcgaaagagcgaaacttcgtctcaaaaaaagaaaaaaaatagatagtctcggattactgtccatcacttttgaatcaatcaaagctatctcacaaatgttactttagaagttgtaccttctatttttttaaggaagtcaatttagcatcgtgtagctgaagaaggtgtatatctgtgacatgcagggagaaatacaaaaaaaaaaaagaattctgcatttgaggacaaacatgtttctagaaaataattttgtacctcccggcttaattgctaaccatatttcaggacttttagttcttcccttgacatttagaattcagccttgaaataataaatatgaattagagccagaaaacttctcctgttcctgtccttgaagtttctgttacttcccagagtttaatccgcccttgaggtttctgttacttcccagagtttaatcttctcttgggagagaaatgttacgtattactctccctttgccttggatactcatctatttgggtcaagttgaggtaatcctgggtctttctatactgttttaatcaggttttgtcctgatgcagttgtgttccatgcctccttcactttctcctaattacaatttctgggcgctagcaaccaaatgtcgattaaggtatacttagggtccaccatcttgtaatctactccagttgaattctccacggttatgtgtcattgctggtggtcataaacaacttcttttgcttttcactgcagctgcttcaaatgtcaccatttgcacttcatcttgctctcgttccatgctctccatttcccacatttctgggtctgctaatggccacattctggtaaggtctccaaatccaactttacctgtaagagtcttggtcccctgattctaacacaaattgtgatggagctctcctctgattatttcttctgcattggctgctttatattgttacagctttgattctgttgacagtacacaacttctgatagatcgtttgatgccaaatgtaattttagcttcctaggtcagttcagttcaccgaatatcattaagcatttacaatagtgctggacgtggtgctaagggtgggggaaatagggacaaatcagacaccatcccagccctgaagaaactattaatttgattaggaggaagaaaggaaattgcaaatcaatgtaaatagtagttgatagttctgatgattttgctattgcttctactctagcctgctccagcccccacctttactgctacacaatctacagagagtcaatgtggacaaccttcactaaagacacattacgtgtctgattaaaacaggtttgtgaaaatacagccttgcttctggactctccaacagatcatcagtgtatcatcttgttctcagtcttataaatcctacataattatttatagcatgcctaaagtagaaatcattaaactctaaatggcaaagcagactttacttttttgcatatagtactttaatcaagtggcttttttatatgctctctttatgtgataaatcaataaaatcatctgagtcctataaaacagtaaaatacatgagaattgtatttttatataaatagtatagaaattcaaagtatttccttaaaattttaaactgctatattcctttattgacattgattaaagaatcatacttctcagtgtgtatttattctaaatatttgcctcacctttagaataaagagagaagtcgcaaaatagaagtcacagactttacatttcaattcatttctgaaacatacgccatccttaaatttttttaagcagagtaatagcatcagctaaattcttcattatctataatttacactcaagtcacaaatttgtattcaagtcaggaatttattttcagttctttgccctgaataagtctattatactttctacacaataatttttgcttatgaatttttatgaaagcaacttgataatatattataactgagtctatatgcacatagggaattggagaattgttcctctcacagacgtacgcaaattgaataatagttccacctaagatacctgcctatttcaggtcaatagtcttttgccttggattacaaataattttccagtactctatttggcatgtatgggcatggtcttaatctgccctaccatatctggtttcaaaatgccagtgctttttggtacttaataattaaatatggatgataaaacattccctggcattaaagtggtacatcggacggtaaaattcacacagtaagacactaaaatttaaggtgatagtagccagatggcttttctgatgttctaaaatacacatgaaggattttattaatttaaccaccatatgggacggagttgaaattagtatctacgggcagttaaatccagatataacctggatataacagtgtgtactattgcaacttttgctgtttttctctctgttgacactacatggaatcattttagttcttcttttccatgtagatgcaggaatagaatacctgccttctgtcagttttatattgttaaaagtacttaaaatcgaaatgagaaaacacttaggtatacatccagaaggtggtaattgattcttatacaaattctacatcattgcctcatgaaatctatcaaggaacatgcgttcaacaattaacattaattttatattttctttactggctcctgaactattttatatccaatataatgttcaaatttaaaaagcagaaatatcaattttcaaagtaactgtacatccacagaagaatattagatgtggtttttgaaatgacattctgctcttggatcagctggtcaacctccttcaagtgtaatctaatttatcacctgttaaattaaggtgatgcagctctagatgacatcggaccagcaactggctaactatgacccatgggccaaatccagttcacagtatgtttttgtactgccctcatgctaatttttaaaaaaaatgttaaaaggttgtgaaaaaaataaataagcaaacaaataataagaagaatatgcaacagaaaccatatgctactaagatatttactatttggcccttgacagaaagtatgttaacctttgtactagataacaaatgtttatacagaattggatctgtaggtttcaacacagatactggaaggcaacaaattcacaaatgtaaaaaattcacactaaaaatcaccctacataaatatggcagagttttcaattgagtaatactaaaagatgaaagttcaattgctgaatacatataagcaaagacaatgtttatcagagccaggttctatgaaatccaatacaacagatttctggaaaattcaaattaattatcagtgttaagctattttaataagcttagtttttcacaatactacaaaaataatttcatttctttctgaatgtaatagtgaacaattttatagtgactttgtattttgtaaagtatattcatctatgtcttctcatttgatatttgaaacatcaaatgtgttttgtttaaagatttgcataaaattacacagctacttagtgataaaatgagattttctgtgcccaagccccatgctcttccccctacacagggttgctccttatcaggtgaaaaaatgtatacaggtaaatggaaaaataattaattgttaattatggatatagctgtatctatttttgtaaaagaagaaactgcaaaataactaaataaattttatcagaggtgaaaaagagtttccaatgcatgtagacatgactagagttaatcatataccaatcgccaataaataagttggttacaaatttaaataaataattgaattcactatatttcagatttagtgtgtttttcagttaatgcaaataaaagctggaagaaatgaagtaaaaattcataaccactacattataaaataactgttcatttttaaggtagtttaaaacatctttagtaaaactgtgttctacagacttctactcagagatggaacagttcaaaatcaagatgattgtgaaagtacagaattgagatacttgcatagcccttctaacatttcataaaaccataagatgcagaattacaatactggtggtataacagatacatttttccttcaagtttacattgttttactaaacatcttccttcatacaaataaaatataaatatatcatttaattcagaatcataaatatcgtatgttctagtaaagtaagagattgcatttccttattgatattcattaacttaatataaattaaaagttacagtattactaagtcatgtagatatcatttttaccactaccattagtgttggtttgtaaaactctagctttattactctactaaaatcttttatgcagtattatataatatgaaacactccagttttccctgtggtatataatctttcacacttttaggttttcataacctcactgactaaaacactctcaaagttactgactttttaatacaaaattttaagtctcaatagcaaatacatttgataaaataaccaggctttttaacaggctattatagatacaatgtattgcatcaatttcaaaccacaattctcaaaacttaaggtaaggtctattgcttagacttgcaactaaggaagtcagatccctgaaaaggtttgtttttatctgtggtctgatggtattcatcacaaatttcctacttggagaatttatgattttatatttcaactttacattataagacaagaaattcaaaaactgtatttcccaagcctctaattgttcatgtggtccaaccttcatgctctatttgccacatcataaatacctcatatattacaacctgagagaagcttttaagtagtaattttgaaaaccaaaccagaaagtgcaagtcaatttctaaccaagttcaagtgtgcctattaatttctgtgacttatttgaaccataaagaccttttcacttgaacatagtggagtcattactgtgactttgctacacaaaattcagtggagaataaagttaaaacgtgattctatctgtctgtgtaacaagagaaggtcaaatctgttttttgtttctgtttagggttttggggtgggggatggactgttcagtctttttgagcataacagctctgccactgtacatggcattggtttaattttcttacttgtaaagagaaaatcattgcttaaataattaggtaatattcctaaaggatttaactccttagggaaaacataaagcaggataaatgtgtttaattataatttggtcatgcctagactatcgtgccctgcttatattttttctttattataactttaacttccaaaaattatagcaaaaaaatgaacacaaccaaaattccatatcattccatcacgtaaaatgatgaattgctctggagagtttaacaatatagcaacttagaaagatgagcatgtatttaaagagatgatacattcaattgtattaagtccacattttcacagaatttcctgcaatgtataaagggagtttccattcccacagctttcaatgtgtttcttctctagatcaaaatggaattccttataacattcacaggtaaatcaatccctcaagcatctgcacatctgagaagattgctcctctccagttcatagccctaagactgccaactctagtactaagaaaagtacattcaaagtacagccctgccattttcccataatttaatcccatgcataattagttcatccgcctgagcttcagtttgctcgtttataaaatgggcttgaaaatgtcacacccaaagggttgttgtagaattatatgacataattcatgctaactattttgggtagtacatgttacacagtatgaacttaaaacataaatattttctattactcattttttggttgttacttacaagattatgtctccctatccccggatgtgtgaaaatttaatcccaagcatgctcatttttaaagcaacgttgaatcgcccacacaagagcttttgttacccaaattctaaggctttgttcctgctgtcacttctattttttttccctttttcaaactctcgatgttatagaatgacacctttaaggtttagataaaattccttctttagtcaagcccactttggatacatacatacctcccattataatatattcttaaatactataattaattgtctcccaacttcccctttcctggttttctaccatcaatcagcattatagagtgcaaatgatgtacatacagcacccttgtggatatgcctttataaatcaaacaagtaagttggttaatttatacaatgcttaaactaaattgctacatttctttagacacaatgaaataagtgttgaaaatattaccttagtcttagtctagtatgtagtatattgtgggaattcgattacatttaatttgattaaaattaatgttattattctgtaaattagatataaaatctttctttttgaattttgtcttaaaatgtttaattttttttaacctttcgtttatttgtttttgcattttttttttttttttttttttttttgagacggagtcttgcactgtcacccgggcgggagtgcagtggtgagagctcgactcactgcaacctccaacttccaggttcaagtcattctcctgcctcagcctcccgagcacctgggatttcaggtgcctgccaccacgcccgggtatttttttgtatttttagtagatacggggttttactatgttgacaaggctggtctcgaacgcctaatctcgtgatccaccagccttggccccccaaagtgctggaattacaggcatgagccaccacacccagctgcattttctttttttaattgtatatttccttcggacttacgtgtgattttaccaaatactattttttataattacattccatctattaaatgcaattaaaatactattaaatagtataaacttcttttttggttcaaatgaaataaaatgatatcgttgtgtatactctgggccttggcaacattttcaaagaaagtggtaaacaacaaaatatgtgacttaaattttcatcgtttgaaaaaatatttttaataaaggtagtaaaaattctactaccctagtaaatatgttccagagatttttagcctaaggaaattctaagaaagtaaaaattacatgcacaaaaatgccaattactgtagtatcaaaaataaatacagggaaaaatagctttcagtaattgaatattcataaaattgatatcatattatgcagcatttatgattttatcttacagtactatcacatataaagaatgtttacaagtttaaacacaacgtgcaaactatgaaattgtatcttctctttgattaaaagtgcccaagttatattgttaacaaatgttcagaagaatttattttctaaatttctaaaacagtgctgattttcccgtgtgtagaatgactgtgctcctgaaactaccaacaccaattatctgcagaaagggaactcagcttattctgctttacagtaagaggtgggaagggatgatccccagtctctcctgcaaatagagtaagcaacgcaaatttctttggaagcaatcagctgaaaagcaacttggccaaagggtgtatatcttcatgttacgtttacagggacattgttgttgtttttttttttttttgagatttattcgtgtttttctgccaaggagtttaaagcatggccgtgaggtaacaaaaaatttgagacattaaagttatatgatattcgtattaatgttgtttaaaccatacattaatgaataaatctaaattagacaaaggagatgttggaagcaatacgtcctctttagcaaagatgctggttatcaatggagtatttttaaaagaaactaatttctcagctctggtacatgatttaaaattattacagacatgcacaaattattcaagggaagaacacaggggttttgtaaaaccattccatgtttttttaatgataaaaacagagctcatataataataatattatagctatcctttctaaaatcgttacttttgctatttatcagctaagtactttaagtctcacaaaatcttattgcaatcagtaatatttttatctctattttacttaagtagaatctgaggctgaaagagaagaaataacttgcctgatgtcaaacagtttcagaaaactagattttctttgtaggagggcagtctctctagttaaacattgtgcttagtttttgttgtttataaatgtatctacctaatcaacaaaggtgtgcagaattggaatcttataaatacaataaaaatgtacttagatcaagatataagaactcataaaggtacataatgtgtcccaaattttctaagaaatatcctgatatcaaaatataagatcgttgatgtcacataatattttttaaaggcgttcttcatgaacacactttatttatattgataagtcttgggccatgtgtaacacctttctataaatgaaagaataaaattaggatgtcacaatttttgtcatcaagttgattatatttattcctgaagaatatccaaatttgtaaaactgagagagttttacagatgtcagagagaatattaaccaaaaaaggcatagcatgaacaaggttactatgcagtggaatgggtcatcaataattatagattttaatgatattatactattatcctcattttacagataaagaaaataagcaacttgtcatactaccacagctaataaatagaaacactggtatttaaatcaatgcatgtttgattttaagcctgtgctttacctagtcgtgaagtgaaagaaaatatccctaaaggttcatagaaagaaatatcagcagttgtccatgaattcagttgaaatggttcagtaacagcattggtcaccagagactaccaatttggggaatgaataacaaaatcatttacttctatggttagatggtaatgggtttagatgacaattttagccaatgcatcaatagcctattttgggcaaggtttttgatagaccaagggatacggttttgtgattccggtttgtaatgcagtgagaacctgtaccgcacagaacagagctatcagtagggatttaggaaacctcatgaatttatgtatgaattataatggaatccacaaaaaaagataacatcttcaagatagaaagaaaaaaatgaactcaagaagattcagttttacacatacatgctttctctctcaaggaaaatataatatcttgttaagctgtaaggtttgttcagataagctctaatatattgcttttcgtaccaggatgcaaagatctggagcagaggtagagtataatacagcaagactcaggcattaaggagattactctttcataagtcacattgaagttttgttttgactaggattttaagttccattttaatcaagtttggggggatttctgatgtaacatgttacaaatgaagaacatagcaaaaagagtgcagagaccaccattttccggaaacaactagcgtgagcattaactgacactcaaatgacgtgacaggtgttagtagtaacaaaaatatccaaacatactccttcattttctttgtgatgaaatctcaccaaactgtaaatatccgaaaatgaagatcacctcagaatgaagggaaaacagtaaggacaagatgaacaaaaatcaggataaagaaggtaagaaatccaaatacgggagagaaataaaccaaaattgggaaaataggagcaaagtaataaacaatgagtcaataatgaaggagaaaacagaggagaaaaataaagttaaatgcctctgttaacaaatagagatacataaaaatgacagagtttttttgaagagaaaatgatcatcataaatcttagtacatttcttgaagtagcaaatcagctaaaatgtttagaattgaatatatatgttagagagggaagtaaggactctgcaattatgttattaacttgatcaatacccgtaaccagacaatttagcaccaccttcacctccaattcactttagtgcttataatctcctattgattgtcagctaatcaatacaatagcttcacttttctctccgttaagtaaccatgatctcagtgccaaccttgacttatttaagatggataaaagctgtattaacaaaatgtattaggtagagtatgatcactttgaaaatttagatgatatttgattatttaaatagaattataatgactaagttaatatgatcaatgaaatgttaaaaatagccttatttactttatcaaagtctactcacattaggacatctctgtagaaatgaataaaataaaactactattgttcaaactcaattattagcaataaccattaaaagattataaattaccaaatgtgctatgccatttaaatagggtgcagtttagaatatacactgttggttgaaatgtaaattagtagagtataagtgtataagcaagcatttgtgtgtgagcattcccttttctctgcctcgtcaccagcatcagttgtttttttgtcattttaataagagccattctgactgggttaagatgacatttcacagtggtttggattttcatttacctgatgattagtgatattgaagatttttccatatacctgttggtcatttgcatatcttttttgagacatgtctagttatgtcctttgctgactttttaatgaaattatttgtttttttgtgtgtgtttttcttcttactgttgagttatttgagttccttgtttattctggatattacgtccttgttggatgaatagtttgaagatattttattccaattaacaggttgtcccacactctgttgtttgtttcctttgttgagtggaagcttttcagtttaatatagtcccatttatccttttctgtttttgttgtctatgcttttgaaatcatagccataaaatctttgcccagagcaatgtccatagtttttcttctataattgttttagtcgttttataattttggatcttgtttttaagtctttgattacatctggagttgttttttttttttttttttttgagactgagtcttgctccgtcgcccaggctggagtgcagtggtccaatctcggctcactgcaacctccacctcccgggttcaagtgattctcctgcctcaggctcctgagtttacctgatgtagtagctgggattacaggcgcatgccaccactcccggctaatgtttgtatttttagtagagaaggggtttcaccatgttggtcaggctggtctggaactcctgaccttgatagatatccagtttttcagcaccattgattcaagagactgtcctttcaccaatgtaaattcttggtacctttatcaaaaattagtttactgtaagtagatacatttatttatgggttttctattatgttctcttaatgtgtatatttttatgccaatatcatgttgttgttgttgttgtttgttttgttttttttttttgaaatggagtcttgctctgtggcccaggctggactgcaatggcacgatctcagctcactgcaagctctgcctcctgggttcacgtcattctcctgcctcagcctcccaagtcatgttgtttttgttactgtggtattatattttgaagtcaggtaatgggatgtctccagctttgttcttcttggtcaggaatgctcttgctattatgagtcttttatggttaaataaataatttaggattattttttctatttctttgaaaaaagacattggtattgtatagagattgcattgaatttgtagattgctttgagtagtgtgatcattttaatggtatgaattcttctgatacatgagcatgaaccctctttccattttttgtgtccttttcactttctttcatcaatgttttttacttttactcatagaagtctttcaactccatggttaagtttttcttagtattttaatgttttgtagccattgtaaaactgattgccttcttcattgtttcttagctagttcattattaatgaacagaaatactactgattttttgtgttgatttttatcctaaaactttacggaatttatttatcagatctaagagtttttgtggagtctttaggtttttctagatataagatcatgtcatctgcaaacagggacaatttgacttcctcttttccagtttgaatgctttcattttttctcttgctgattcctctagataacaattacaataccatttgaaataggagttgtgaaaatgagcaaccatcttgttccagttcttagcagaaaggatttcagcttttcccgattcagtaagatgttagctgtagcttttttttttctgtatggccttattgggttaaggtatatcccttccatatctagttttttgatagtttttatcaggaagggatggtgaaatttatcaaatgctttttctgcatctattaaaatgatcattggttttttgcccttcattctgttgatatgatgtatcaaatttattgattcatgtatgttgaactacttttgcaccccagtgataaatcccacttgatcagtgtgtattctctttgtgatgtgttgtgggattcagttcgttggtatttcgttgaagatttttgcatctatattcatcagggatatgagtccatagtttttcttgtgtggtggttatgaccttgtctggttctgatatcatggtaatgttgaccttgtagaatgaattagtgagaattctctccttttcattttttgagaataatttgaagagcactgctgttttttttgtttgtttgttttgttttttgttttttcctgtaaatttggcagagtttggcaatgaagccatccagtcctgagtacttatttgttggaagatatttttattactaattcaatctcattacactttatagatttgttcaaatttctatttttttccgactcaaccttcataggttgtacttgtccaaaaatgtttctacttttctagaatttcctatttgttagtgtatagatgttcttattctctctgttggtcttttgtatttctatgctatcagttttaatgtcttctttttcatttctaattttgtttatttaggtcttctgtcatttattgctagtctagttagtagtctatcaattttgtttatctttcaaaaaacaacttttcatttcatcaagactttttattgttttgtctctattttgtttagttcttctccgatttttatttcttctactagttttgggttcagcttgttcttgctttagtaggtcctttaggtacattgttagattgtttatttgaaatatttctacttttttgatgcatacattcattgttataaaattccctattagcagtacttttgctgtatctcatagattttggtatattatatttcatttgtcatttatttcaataaatgtttgaacttatccttaatttcatcagtaacagcgttttacagaaacatattgtttaatttccatgtatttgtacagttttcagtgttcctcttgttaatgatttctagttttgttccatcttggtcttaggagatacttaatatacttttgatattttaaaatttgttaagacttgattaacataaaaatatatggtctatctggagaacgttccatgtgctaatgaaaagagtgtatattctttagttactggatataatattttgtaaatatcgggttcatttaatctaaagtgcagtttagatgcactgtgtctattaatttgctgcctagatgatctgtttaatgctgaaaggtggagatttgtagtctctgactgttaccatattagagtctagctcttcctttaatttaataatatgtgttttgtatatctaggtacttcattatcaggtgcatatatgattagaattcttgtagcctcatgttgacttcatatcttttataatgatgcagttgtctctttttactattttttgacttactgttttatgttatataaatacagctattcccacttgtttttttaaaaatttctgttgatgtggaatatcttttttccatctctttacttttatctatatgtgtatgatgagatgagagaataatttcttatagtcagcttagtagggtcatatttgtttctttttttaaatccattaagccagtctataccttttaagtggaaagtttaattcatttacaattgaggtaattattgatatgtatttactttttcctgtcattttatcaactgctttctgggttttttgtatatcctttgttcctttatttcccctttttgtttatcattgtgaattggtagttttctgttgtggtaccatttgaatgttttctcttcattacttgtgtgtttgctttactggtgaattttacagttcgatgtgtcttcatgataaaagatatcatcttttgctcccaggcatttgactctattaagcatttttttggaggtccagtcccttagcttttgtttctctgggaaatactttgtttttcctttattttatgaagagtaactttgctgggtacaatatttttgactgctttttgtttgtttgttttgggaagtttgaatatatcattctattctctcctggcctgtaaggtttcttctgagaaatccactattggtctcctaggggtttcttatgagtgactatatacttttctcttgctgtttttaggattttctctttgtctttgacatttgacagttgactataatgtgccataaagaagacccttttaaattgtatctttttcagaatctctgaacttcctgtatctgtatgtctaaatctctttctagacttgagaagtcatatattattttgttgaataggttttctatacctttcatttttgtcttcaccttctggaacattgaaaattcaagtatttggtcactttttattgtctcacatgtcaaataagcattgattattctttttatctgtttctttcctttattattttctgtctgggttatttcaaaacactctcttcaaggtcagaagaatgtatcttctgctatatctagtcttctgttgaagtttttaatgtattttttattttattcaataatttcttcagttccagatctttgattcttttttacagtatctatctgtgtttgtccattctcatgatgctataaagaaaggacaaagactggataatttatacaagaaaaaggtttaattgactcacagttccaaactgcccgggaggccttaggaaacttacaatcatggcagaaggcaaaggagaagcaggaaccttcttcataagggggcaagacaatgtgagtgccagcagggaaaatgccagattcttataaagccatcagatctcatgagaactcacttgctatcatgaatacagcattggggaaaccacctccatgatctaatcacttcctaccagttccctacgagaacatgtgggggttatgaaaagtacaattcaagatgagattttggaggggacacagcctagtcatgtcattcaactcctgccccctctcaattctcttgtcctcacacttctaaacacaatcatgcccttccaatagtccccccaaatcttaactcattgcagcattaacccagaagtccagatctacagtctcatctgagacagtgcaaaagccttccacctatgagcctgttaaatcaaaagcaagttagttacttcctagatagaatgagggcacagtcattgggtaaatacactggttccaaatgggagaaactgaccaaaacaaaaaggctacagccctcatgcaagtccaaaatccaatacagcagtcattaaaccttaaagttcgaaaatgatctcctttgactctatgtctcacaaacaggtcaaattgatgcaagcagtgggctcccacagccttgaactgctaagcagggtggattttcagggtacagccccctttctggctgctttcatggcctagcactgagtgatgtggcttttccagatgcatagtgaagctgtaggtggatatggaggatggtagccctcttctcacagctctactatgttatgccccagtggggactctgtgtgggggctctgaccccacatttctcttctgatctgccctagcagaggctggctatgagggttcccttactgcagcaaacttctacctggacatccaggtgtttccatacatcctctgaaatctaggcagaggttccacaaactcaattcttgacttctgtgtatccataggctcaacaccacatggaatctgccaaagcttggggcttgcatcctctgaagcaatggcccaagctgtaccttggccccttttagccactactggagctgaagcagctgggatgctgggcatcatgtcctgaggcttcacagaggagggccctgggcctggcccagaaaaccatttttccctcttaggcttctggatctgtgatgggaggggctcccgtgaagctctctgacatgccctggagacactctccccattgtcttgctgattaacattcagctcttcattaattatgcaaatttctgtagccctcttgaatttttacccagaaaatgggtttttcttttctatggcatcatcaggttacaaattttccaaacttttatgctctacttccttttgaatgttttgctgcttagtaatttcttctaccagaaacccaaaatcatctctcttaagttcaaagttccacaggtctctaaagcaggggcaaaaatgccaccagtctctttgctaaagcatagaaagagtcacaattgttccagttcctgagaagttcctatttttttcctatttttgccattgtgaatagttctatgataaacatgggagtgcaaatatctattcaagattctgatttcaattcttttggataaatactcagaagtgggatacctggatcacatggtagtattattttgagctattgagaaatgtctatactgtttttgacggtgacattttgcctattccattctcacaaacagtgcataagggttccagtttccccacatcctcaccaacacttgctgttttgttcttttgataatacatcaccttaactgtgtgtgagacagttctattgatgagcttggactgatcttcttctgctgctttctcttagtaattctcaagaattacagtagaatgtgcaagaaatgcagccctgagatagggaagaacttgctagaacaggatgtcctttttttttttttttttttttttcagatggagtctctctctgttgcccaggctggagtgcagtggcacaatcttggttcactgcaaactctgcctcccgggttcacgccattctcttgcctcagcctcctgagtagctgggactacaggtgcccgccaccaagcctggctaattttttgtatttttagtagagatggggtttcaccatgttagccaggatggtctcgatctcctgacctcgtgatctacccgcctcggcctcccaaagtgctggaattacaggcgtgagccaccgtgccaggcctcaggatgtcctttaatgaatgaccacagcatgtcatgtttctccaaggtcatataatccaggccaggctgctgtccagagcccttcagctgtggtgcaagtggagcacacacaattggaacttcatctgccctgggcagcttccctgagcttgggggactagttcccaatgaatcttaggcttctgttgtaccttactatctctaaataataaatcaacttcatgtaacttgttgtatataagtgcaacaagttctgtctcattagactcagacaagttttaaccagtgcataatgaacctgcttcacagcacaaggtgaaactgcggtttcacttggcatttccctaatgattactgatgttgagcatcatttacatacctgttggccatttgtatgtcttctttggagaaatgtctattcaagtactttttaaacaggttatttgtttttattgagttgtaggagtttcttatgtattttgaatattaacatcttagataagtgatttgaaaatatttttcccatttcataggttcctatttcattcttttaatggcttaatgctaattctaaataatgtctaatttccagtatacatttttattcaaaacataaatatgttgaattaagatttttaaaagtatttaacttattttggtatggttatatttttgtaaatttttaattttaattagattttaatttaattaaaatttatggtagataactaattatagtgattattcaaaattttgtttagatttgcttcatggctttgcacatatgtatggttggtaaatgttccatgttcacagcagaagaatatttatgttatgtttctttcttttttttttttttttgagacagagtctcgctctgtcacccaggctggagtgcagtggtgcgatctccgctcactgcaagctctgcctcccgtgttcacaccattctcctgcctcagcctcccgagtagccgggactacaggcacctgccaccacacccggctaattttttcgtatttttaggagagacggggtttcactgtgttagccaagatggtctcgatctcccgatctcatgatccacccgccttggcctcccaaagtgctgggattacaggcatgagccaccacgcccagcctatgttatgtttctgtattctacaatgtccaaacataataattttgttatgcacatatttcatttctttctttttgctggatctatcaattactgaaagaggtgagttaaaatatccacacacaatgtggactttattgattttcccttgcagttatttgatttggctttatgtaattatggcacattgcttgcatttgtaaccttgattcttcacctctccctgaatccacaccctttgtttaaccttctagtgcttttccatttgactctaatctttgtctttagcaaaaacatggcatgagcttgaacagtgcttgatcaattgtgcttgtttcttgccatctgctgatcacaataagttcatgccctggcttgtcttttgcagatatccagccaagatgattcaaactagctggcagctagctaatgaccagttatatgagtaaaactatgtgagccagaaaaactagattgtcaatccaagcctagacagttgacctgcagactcatgagtaaatacgtttttttaatactcctgacattgtgtgctctatatgtgtgtgtgttggcatgtgtgtgttgtttgtcattcaaagattttattgcaacagagaaattatacagcattttacgtttttataggcagacatattctattatatacttgggaattagcaatattttattataaaatgacttgcttcgagacaagtaatattttttcttttttctcctttcttttagattggtttttactcgttaaaactattttactctcttatacttaacttttcttcatctttgtgtttaatgtgactcctttacgtaatgtaatagagtgactttcataatcaatagaaagttttatggtttatgctgacttacttgtgctacttgtaagatgaagaaaacagcaaatacatacagagtaaaacagaggttggaagcttgctacttgcactttaattttatattttattctcaaggatacataaaatatcaaaatacttttattgtatttcctgtttgataggtataatggttaattttaggagtcaactttactggattaaggcatacgtccatagctggtaaagcattatttctgaggatgtctgtgagagtgtttttctgaagagattgccatttgcattggtggatgagttaaggaaggtcttccctcaatgtgggcaggtaccattcaattatgtgagggcccaggtagaaaaaaacaggcaaagtgaatatgctctctgttctggagctgtgacacactgcttctcttgtcctttggcatcagaactccagatctggtctttggactctggggtttgcaccagtggccccctagtttcataagcttttgaccttggattgaaagctacacgatcagcttccctggttctgaggcatttgtacttgaactgagacacattaccaattttcaggggtctctagcttgcagaggacctatcatgggaatcatcagtttccataatcacatgagccaatttcccgaataaatcctctatctatctatctatctatctatctatctatctatctatctctctgtctatcatctgtctgtctgtctattatctatctatctgtctatctatatctatctaattggttttgtctgttaggagaaccctgactaatacaatatgttaaaaatacaatatgttaacactggactcccatagggtctaatgttatagcttcaggactgaatatatgtaaaggaatttaaaaataaataccttgccgatgagttgttcaggccctaggaagttctcttgtgaacctctaacatgtatattgcaatagaattttctggacactcacattatattataagtctgccttgccccatgaccttgagttaggagaaacatataacaaaaccatattacatccaccatcacccaaaataaatttaactcctcagcatatcaatgatattatctgagactgtgcagctttgaaatgcacatatatgtcaccactactgtgtggtagctttaacctagaaggaaggagtagttaatctgcagcgttcataagtaggactagaaggaatgtgaagcaaggaatagaatgaggatgaaagtcttagaaaacatgaaaaaaaataaactgttttaactggataaatatttaatgccatatatgtttaaacatcagaattgatacaaatgccctagtgcattttgtgttgctatagcaaaattccgagatgggataattcacaataatttatacagaaaagaaagtttggccaggcgcagtggctcacgcctgtaattccagcactttgggaggctaaggtgggcggatcacaaggtcaggagatggagaccatcctggccaatatggtgaaaccctgtctctactaaaaatacaaaaaaaaaacaaaaaaaaaaaaactagccaggtgtggtggtgggtgcctgtagtcccagatactccagagcctgaggcaggaaaattgcttgaacccggcaggcaggggttgcagtaagccaagattgtgccatggcactgcagcctgggcgacagagtgagactccgtttaagaaaaaaaatataaaaaggccgggcgctgtggctcacacctgtaatcccagcactttgggaggctgaggcgggcagatcacaaggtcaggagatcgagaccatcctggtctaactcagtgaaacctcgtctctactaaaaatacaaaaaattagccaggtgtggtggcgggcgcctgtggtcccagctactctggaggctgaggcaggagaatggtgtgaacccgggaggcagagcttgcagtgagctgagatcgcaccactgcactccagcctgggcaacagagcgagactccatctcaaagaaaaaaaaaaaaagaaagaaagaaaggaaaaaagtgtatttggctcataattctggaggctggggtgtcccagaagcatagtgttagcatttactaggcttctggtgagggccttttgctgagtcataacatggtggggaagtaaaaacaaaagggcaagcaagcacgtacaaagaggcaaaccatgaggggtaacctctcttaataataatctgctctcacagtaactaatagagctccgtgagaagagaactcagtcctgtgagactacatcagctctttcattaagggtgaatccctcataacccaaatgcctcttaacgatcccatgacctctcactcagtagcattacattgacttttttccttactttttttttttttttttttttgagccggagtctcacactgtctcctgggccgagtgcaatggccagatcttggctcactgcactctccgcctcccgggtttaagcgattctcctgccccagcttcccaagtagctaggattacaggcatgtgccatcactccctgctaattttttgtatttttagtagagacggggtttcactatgttggccaggctggtcttgaacccttgagctcaggtgatccaccctcctcagcctcccaaagtgcccagcctatattggctttttttaacatgagttatgacagggacaaacacatccaaactatagcaaatggcatatcaaaatttttaaattttaaataaaaaaagatctgacaatgctgtgagcacccagaattctcacttttcctgcctgaatatcaagattccttgattgttacctataggagaattttcggagaggatattaggttgttcttgcgtacaaattaagacctgacattctgatatattaaagatatgaagtctgatgttaacgaatatctggaagtgaggatagttgtacttttttaaatatgttttaaattcctttgactttgcaatgctttcccacacaggcttagctaaattttcagccaggcacggtggctcactcttataatcctagcactttgggaagccaatgtaggtggattgcctgagctcaagagttcaagaccagcctgcataacatgctgaaaccctgtctctactaaaatacaaataattaaccaggtgtgctggccggcgcctgtagtctaaggtacttgggaagctgagggacaaaattgcttgaacctggaggcagaggttgctttgaaccaagatagcgtctctacattccaggctgatgctacagagcgagactccgtctccaaaaattaaaattaaaataaacaaaacaaataataaatgaattttcttttattactttctgaagatcttccttttagtgtgactggcaagtttagtctccttattgttttgtgatttctgatctttgacttttaaagttcattaactttggagttgcttgtgctgtaggaatcctgactttattttaaaaatgacctcaacagatactttactttctttagccaatcagtaattcatttcaaaatgtcatttaaaaatatgttatctcacaacttaattctccttttaaaagttgtttcagctgcatgcagtggtgtatgttgtagtcccagctactcgagagactgggtcaggatttttgcagtaaaaataggtagattataatgatttgtttaatactttttgttcaccatactgttgttaaattgtaatcattttctctattcattcaattagagaagttattggctgggcaccacggctcatgcctgtactctcatctctatcgagggccaaggtatatatcgcttgagcccaggagtttgagaccagcctggacaacatggcaaaacttcatctctactatatatatatatttttttatatattatagtttataatatataaatgtgtatatatattatttatgtatatataaataatagccaggtgtggtagcatgcacctgcattttcagctactcaggaggctgaggttggaagatagattgcttcagctcaggaggtggaggttctgtactccagcctgggcaacagagccagaccctgtcacaaaaaaaagagaaagagagagagaaatgagaggtgacagcgtgctgacagtcctcagagcccttgcttgctctcggtacctcccctgcctgggctcccactttggcggcacttgaggagcccttcagcccaccgctgcactgtgggagcccctttctgggctggccaaggctggagcccactccctcagcttgcagggaggtgtggagggagaggcgcaagcaggaaccggggctgcgtgcggcgcttgcgggccagctggagttccgggtgggcgtgggtttggcgggccccgcactcggagaaggccagccggtcagccctgcctgccccgggcaatgagggacttagcgcccctgggccagtggctgcggagggtgtactgggtcccccagcagtgccagcccactgacgctgcgctcgatttctcaccgggccttagctgccttcccgctgggcagggctcgggacctgcagcccaccgtgcctgagcctcccaccctctccgtgggctcctgtgcggccggagcctccccgacgagtgccacaccctgctccacggggcccagtcccatggaccacccaagggctgagcagtgcaggtgcaccatgcaggactggcaggcagctccacctgcagcccccgtgtgggatccactaggtgaagccagctgggctcctgagtctggtgggatcgtggagagtctttatgtttagctcagggattgtaaacacaccaatcagcaccctgtgtttagctcaaggtttgtgagtgcaccaatcgacactctgtatctagctgctctggtgggaccttggagaacctttatgtctagctcagcgattgtaaatacaccaatcggcactctgtatctagctcaaggtttgtaaacacaccaatcagcaccctgtgtttagctcaaggtttgtgaatgcaccaatcgacactctgtatctagctgctctggtggggccttggagaacctgtgtgtccatactcggtatctaactaatctgatggggacgtggagaacctttgtgtctagctcagtgattgtaaacgcaccaatcagcaccctgtcaaaacagaccacttggctctcctatcagcaggatgtgggtggggccagataagagaataaaagcaggctgcccgagccagcagtggcaacccggtagagtccccttccacactgtggaaactttgtactttcgctctttgcaataaatcttgctactgctcactctttgggtccacgctgcttttatgagctgtaacactcaccgcgaagatctgcagcttcactcctgagcccaacgagaccatgagcccaccgggaggaacgaacgactccagaagcgccaccttaagagccgtaacactcaccgcgaaggtctgcagcttcactcctgagccagcgagaccacgaacccaccagaaggaagaaattccgaacacatccgaacatcagaaggaacaaactccagacgcgccaccttaagagctgtagcactcaccgcgagggtccgcggcttagttcttgaagtcagtgagaccaagaacccaccaattccagacacagaaagaaggaagggaaggaaggaaggaagggaaggagggaagggagggaaggaagggaaggagggaaggaaagaagggatggagggaggggagggaaggggagggagggagggaagggaggggagggagggagggagaaaaaaaatcttgctactaaaattttttctattgaaaatttctttgcctttttcaaaacttgtacacaataactgacactatttaacaatatgctaaatatggtaagcaataaaaataaaccaaaacctttgctgatgtaacatattacagacaccaaaaactgatctcttataaaaagtgatatatgaagtctgtggtacatgaattctgtctcttttcatttatcaaagtctaattattctctaggtacaaatagataactcttgtttccccagggcataggtatgtaagcagagcactacctaaaaacagatgaaaaataaatagatctactcaagtgaaaaagtttagcaagtgcatctattgtgtatggcaccaattattttacgaacttgctgctttgtattcaatacaaaaatgacaaatgaggaccctagtacatttctatataggccttgtctatgtacataaatcatattggaaatttgagagattcatgagactagtacaggccaaaagtgctattttacctgggtaaataaaaggtaagaaaacaattttatcatcatgtgacttatttttttaatctttaaatttataaatagggatatgaagccagctgaagacactttgtttcatgtgctttcagaaatttatgtaagttaatctttacacacgcacacacacacatacagaatttggtatctgtatgaaactacagagcctcagaaaagatgattgtacaaaaccatatgataaaaatacactgctgaactataagagcatttccgctggattgtaaaacacatttatcttgttatatcattaaaatggaaatttcagattaggttatagtatatcctaatcattacgaaggatggggctttcaaaataaaatatacttgaagaagtataaaaattattttattatgacactttcttaacgtatttcaatattcaggcattattctaagatttaaagaatactaaagcttacaagtttgtatttttcaccttatcttttataattagttaaccttaatgtacatgtaatttatttacattatgttgactaacagtctagctcactgtcagaaagaagtcaaattgttgtgtattaggagttaatttttacaaatagtatttttatttgtacccaaaatgtcttgtatttaagtgttttttaaaagttttttgctatagatataaaatgatatgaaaatactacatatttcaaaaatacggtcctgataaactaagagaatgtggtgttctatatgtagtaattgtcagttattttatttttaaatttgtaaaaaattattaacaatatgagatattgtttatgtatataacacatagagagggagcaagaaagaattcaacatatcaattaattgtttatatatagtaaaataatatgtgaaatagattagtgtgttcaatcttattcatgttattcataatacataagtccatttcctcaagtacatttaaaataaaaccagttttctggtctgtcattcctcattctggtgctttgccttgcctcttactgccccatctccccatatttaaagtgaactttaactccaacatgtattttctgtacaaggcgcttagggtttcctgaatgacacttcttgttttcatagataggtcaatttttccattagctggtatatttgcaaattgggaactgaagagcaaaattatcactcatggccattacttgattatacaatcggtggtgtaaatatgcagagacataattgtctggaaaattttgtatttaatatcctagtaaacatcaatgtgacattatgagaaatgtgggaatttagttgtacttcctgtcactttcatgtatcagtatagttacagctccaaaataacaggtacttgtacgtaacttttacttgcactccttgcacataagttcaagttcacaacctattttaccttttagtttatgtttatatttatttatatcattttaactatagtcaaagatgttagttactgagtacaagttttggaaaaggttgagaaattttcaatacttttctgcaggatttttttaaattaaagaaacagtcctgtgatttatgggggcactgttacttttaatgaactcagggcctataaaggttttaatagagggataaataagaagcagtgaaagtgaattgacagccccgcctataagagaaaaccagagagtttcttggtaaagaacaacaaagtcaagggaaggaagcaagggtgggtggctgcagacctcttgagttattttttttcctttgagatgcagcatttagggtagctatcactctaggttccgcctgctacagcaggtgtttcttttaaataaacaattggtttatgcacaactctttccccctaatcacagtagtcagtttctttctccagttcctctttggcacattatttttattaagagcaccagtgagaagccaatatgtgatccgaattcttaaccagatagctaaacaaatgtagttcttcagagctttctaatgtgcagtgggactatgcttcttaaaaataccacttgcttttcagtcaacacttggggacaacctactatactttccagcatgattggtatacctctctgctattagagagaaataacccctagataccttttccatttcagtggagatgacgatgcactgaaatagctctcgggtgtacctgaaaccatgacattgcaagggagtttatattttaaagctaagaagttacatttcattagatgttagtgtctaataaatatgcagtgcactgagagacttcctagaaagacagagagttggtacacatttcgcaaattgtttgacagtcattaaaagttacataaatcacaataaaatagacacgaaaacttcatctacagtaaaactagacaagttcccatcatcatcccacacattctgaaatggcaacctgattcaatgaaatatagatgaagctgaaaaatgatacaaccagctaatactccattttctggcaagtgaacatagtgcaattgtaggactacatacagttttttttaacagtaatatttcttatcctgaaggtgtaagagctgaagccctggatagaatatagagagcaaaatgagcaaactatttagagatgagacttgcaagtcagcctggagtagaattccatcattgaaagcagtgattctcagattttagtgtgtataagaattactaagaaagcttgttaaaaacagattactgaatcccgttcccagaatttctaatttgataaatcagtggtgcttgagaatttttctttaaacagttcctgagtgatacagaagccgcaggtctgagactacactttgaggtagaaatgactttttaaaatgtttttaatgtgtctttgacgtaactttcctaagagaaagcaaactgtagacatggaaacaagctgcctctaatagctgtgggatgtgggtggggaaagacttgggaatggcacacagaaaaagctacattgctttctgaaaaccagaatctagtatcatgctgtgatggcttcgtgctgtgtgaccttggccaggctccatttcctgtccaacaattccctattcagcttccacatagggtgggctatttaaaaagatatgtattgacacaatcattctataatttaacctaaatattttcaaacataatcaatttaattattagattataaattttaagggcatgaaaatccacaaaaaattataattctttatccaaaactatgtagtaaacttttatgcttttaaagtagtcaatgtaaggaaggaatcaccgaagtgaaactaacccaatactcccatagatagttttttggataaatatagaaattgactcttctggtttcaaagcttgaaacttacatttacttatctgagttccttcctcagaaaaccagacctctcaaaaagtatcaaacaactgaaactcaccagatcctcccatccagacaatgacataccagtcccctcattcatcatgattgcttacttaggcctccccagttcccgttttattacatatagttacatttcttctctgatatataaacccctaattttagttggttagggagatgaatttgagactgatctcccatttccttggctgcacaccattaaagcctcctttcttggccataatccataattgtctcagagattggctttcagtgattggctttgtgtgagcaggaggacctagactgaaccttttgtgttttggttaaaaaaaagggagaataaaaaataaaatagaaaaaattactataattttctcatacattctgctaggtagaatgtaaaaaacataaaagtgagtcttaaaaaaaaagcttactttgaagactagaaagagttaaagtctaataatttcaagtcagtaaacaagccttctgttatcagtgttgtataccaatagacaattaatattgaagaatctggggatgaagttttgagggtattgaagccaattataaagatattgcaataaactaaccttgatcaactgaggtcattaaaggaaacaaagtgagacaaaagagaatgaaactttatcataacattggagtagaaagttttaatcacattttgtattgattttacagaaaaaaagattggatttcaaagttgagttgtcatcaattcatgcagtgtggaagtaaatacattttataatgtattactaacttacaaaagtctttaagaattcttattttgtgaaagtggcaaggcaaataagattgtctttagttaacacaatgcttcattctttttccttgacgttggcctcctctttaatattaaaaagcaaaagaagtcacagggagattttaaaactacatcaattcagtaaggtgttatacactttttctgaggcgtctcagctaattcagttaacatccttttttttttatctttttctcccttttctttctcaaaagggttccttctgttttccactgacattgtgtattagtaatttacttagactaagtgagaacattaaaaccttaggttgcatctgcaaaacaaagtttaatttgagatgaatttatttatcctacacacacccacacacagacttatctaaatggcacgaagtaaacacacacacacacacacacacacggtttctattgggagccaccacttaagggatcacattacactagaatcagagaagacgtggtagaaaaatttggggtaggttaacaataacaaaatacattggtgtttcagacaaagtacaggtgatagaagatgaaggtaggaaaaagaataagattgggcagggtgcagtggctcactcctgtaatcccagcacatggggagaacaaggcaggaggattgcttgaggccagacgttcaagaccacccctaaaaacctagtgaatctctaccaaaacaaaaaagaaattaacaaattagctgggtatggtgctgtatacctgtatctgcagctatgcagcagctggggttggaagatgcttttgtgtccggagttggtgggttcttggtctcactaacttcaagaatgaggccctggattctcacagagtgctacacttcttaaagatggcgtgtccagactttgctccttctgatgtttggacatgtccagagtttcttccttctggtgggttcatggtctggctgacttcatgagtgaagctgcagacctttgcagtgaacgttacaactcttaaaggcagcgcatctagagttgttcattcctcttggtgggttcatggtctcgctgacttcaggaggcagcgcatccagagttgttcactcctcctggtgggttcgtggtctctctgatatcaggactgaatctgctgaggttcacagtgagtgttacagctcataaaggccactcggacccaaagagtcagcagcagcaggatttattgcgaagagcaaaacaaggaggcttccacagcatggaggcagaccccaccaggttgccactgctggcttgggtggcccccttttattcccttatttggccccacccacattctgctgattggtccattttacagagcactgattggtccgttttacagagagccgattggtccgttttacagagtgctgattggtgcgttttacagagtgctgattggtgcatttacaatcctttagctagacacagagtgctgactggtgcatttacaatcctttagctagacacagagcactaattggtacatttacaatcctttagctaaacagaaaagttatccaagtccctacctgagccagaagcccagctggtgtcacctctcactttgagcccagaagtttgaggttatagtgagctatgattctgaaacgggagagttccctgacaccaccccaccaccccacaacacacacacacaggatgtgtgataggagtgtgactcctcttttaggtcatcactgctactcaaacccattacaggatggggagcacatagatgggcaggtgcaggaaccagagtgaacacccctgggcaccagcaccacagagcctgtgacttccagagcccaaatgggcgtgtgttacggtgactcctttagttgctgatggcttaagtgttcaatggaccctctgcctttttgcaagggcagggggccaatgtgattgctttctatatcctgaggtcttgtccagcattgcagaagaattgggtcacgtgtacttgaaggatggcctatgaaagggttttattgagtggtgaaggtggctgtcagcaggatggatggtagctgggaagcggacagagtgggaagacaatcttcccctggagtttggtcagcggacaattctccaactgtccccagctgaactcctcctgacgctccttctcttccctccttctctgcctctcttctgctcttctgttcatccgctagtatcctctcgtctccttctggagctgggggtttggggtttttatgggtacaggatagggggcttggcaggccagaaggcaacttttgggcacgaaaacaggaatgcctgttcccatttaggttaacgggtttctatggtttgcaggcttgggagcggggcctttgcgggggaactgccctcttttactctgtatttccctgtctcctgttcatactaatcacaccactgcactccgacagagtgagaccctgtctcaaaaaaaaaaaaaaaaagaaagaaaaaagaataagattgattatgcttctatataatttacttttttaagaatatgaagaccacatagaatactatacagtttgaaaatacaaacatttgcaaagaacagctttattgctgttgatttagatatacatacagatacatacattaattatgtgatcttaggagatgctttatgttccactaattctattattttggcaacgatctctgacacaaaaaaaaaaatgaacagaaagatcaaatttgtgatctttaacattttcagacaatatatgcagctgatgtgcctgtctattattcctttggccaaaaactcattggtgaattaagaaatagccatatgggagtgtttgttttcacatttgtaacagtttgtttataatttttaaatccttatctatcacattgcaagaattctttctctcaggctagtaagtttgggagggagctggttctacaaaatatttctagaacagaagaagaaaaggcagattgtttccatatatattttagtcaactgaaagccacatgatttatggcctttcatattctcatttgcagctcttcaagctgtacctgagctctatgagcttctctgacaacctaaattgctttgagaacaaagactatttaaaataaaatcatgctaagactgattggacacaggcatgtgaatgtgagagggacatcaataggaattggtagctgtactgagaaattaggtctcacattcaaaataacacaagtcattgagaacagcctcattcgatagaactttctcagaatcataactataccacacatgtccacaagtacatagggactggataaatcttcagtgttgggtatagctatttatctttttttctgctttgggaattcaagtgaagcctttgctaaaacactgttaaccatggtactccaaatgctgttatgctagttatatatttggttgaagaggttgttgtaatcaaatcggcattactgaatacaagtatggagattctcctgaaaaaaaaatacaaatgcttgaatagaaaagcaaaagaggacattatagtgttccttctccaggaaatgggacattccagtgatgctcacactaaaacaatgttattgtttcaacctatgcattaactatagttggagcattccaaatcctaacatatattcaccataaatccaaatacactgacaaccgctctcacattccctttgttcaactgatctggagactgatcaattgtttgatcagtctcaatcaattggaatatgttttaacagtttacctacaatagagacttaagaaatggaaaatatcacacacacacacacacacacacacacacacacacacacacacatatatactcccacatgacaaaatttctttgcttgaccaaactttagacagttttctgaaccttcttctaggtccatctgtgcagttccttataaatacaattttaataagaacctagctgagttggtttagcaaaaacccacaatattgagaactgatcaccctcgatatctgatttggttccttatcttctacttccaggtgatgcctgccttcggcaagaatccagttaggtctgtttagccagaataccccttacctctgatgttttctcttagtaattctgtatccactcaccctcacactactccttggctataaatccccacttatcctggaggtgagcccaatctctccccctcacagcaaaatcccattgcaacagccccaatacctatcacagtggtcctgaataaagtctttcttaccatgctttaacaagtatcattgaataattttttgttcatcatacacaactctcataataaatatatattagcctagacacatacccaagttggaagagtagtggatatatcataatatatgttttttgtttaaagtcaatatttttctagcctaataaattaactgcaatttagaacacattttatggaaaaaatatcatatatgaaaggaacttacctgctcagagttttctttttttttttccttctttttattttcagcaacactgcacatattttggggattgtcaatatttaattagccaaccgatctcaatcactaatcttttgtatgaaagtctccacatcaccatgtgggccataaatatttttcaagataaatttggcacaatggctgcctttgatgtacttgctcaacaagtgtgcatttggtacccaccatgaatcaggcactcttctaagtattatgcctaatgaattttatggataggatcctttcctttgaatctccatacaacggtagaattgggagtacaaaaaaaaaacatgataaacacttcagtgtgtaaggcaaaagacacatttatgaccactctagaatgtgtgtcaatgtaagtgttttcaaagaggaaagcttttaaaatcttctgatgaaaaaggaatatgtcaaatctgatttctgcttctttccaaccctgtgctattcacttagtattttagctttgcttttctccccagtaaaacagagataagaatgcctgtactttctgcctgccccacagaattgttgtaaatatcaagtatttttgttgatgttgttgctgttagtagtggtagtagtagtaatagaattaagtagaagtgtcactaatgtaactttgggcaagatctattttaaataactaagccttttatcaagttaatccacttctattttttttttttttttttttgagacagagttttgttcttgttgcccagggtggagtgcaatggcgcgatctcagctcactgcaacctctgccccctgggttgaagcgagtctcctgcctcagcctctcttgtatctgggattacaggcgcctgccaccaggcccagctaattttttgtatttttagtagagatagggtttcactatgttgaccaggctggtctggaactcctgatctcaggttgacccatccacctcagcctcccaaagtgctgggattacaggtgtgagccaccacacatccaatccacagatacatcagtgaagagggaatgggccaaaggataagagagagagaagggtaaggaaaaatcaaacagatatcaaagattgaacaggcaagttctgaatccaataccagatcaggagcctgttacaaaattttcctattctactccatttcctctacaactaacttattttccagttcatctcattgagatattgttagtaaaaatatttttcactgggtttttatgatgcatgcagtgtgcattggaaggaataagagttttccttaagtggataggtagcaaagccagaaatcacagagtatagcatttataaaccactcatcatatggggagcatacaccctggatatcagaaacaattgcatttcaccctaacaccctggaagccagaaacaactgcatttgaccctgataactgaatgggttctgtgcacccaaactttactcttttaaacaaaatatgtccttcaggggaggtaaatgactccccagagaggggcaaagacgcactcctctgtaagattttaaatgttagttataagagagagagatagttatccctgtcattctcccaggaggaaaggcacggggagtagcgaagtctggcacgacatgagttcagggaacattttcatttcagtgagcatctgctgacaggtagtaaatccagtggtaaccggcatgtagtgtgggtgcctttctgtctagtaagcatggtgagaccaccttatacctgctggcataatgcctcttgttgtatttgagcttaatgggagtttaaaaactataagagaggccgggcgcggtggctcacacctgtaatcccatcactttgggaggccaagacaggcagatcacgaggtcaggagatcaagaccatcctggctaacacggtgaaaccccgtctctactaaaaatacaaaaaaactagctgggcgaggtggcgggttcctatagtcccagctactcgggaggctgaggctggagaatggccggaacccaggagacggagcttgcagtgagccaagatcgtgccactgcactccagtctgggagacagagcaagactctgtctcaaaacaaaaaacaaacaaacaaaaaaactacaagagaaactaaaagaaaaaaattggctgtattgaaaaagaaaagctctttttaacaaaactatattattttggtgcatatctcacccttatgattttatattttcacaattttgcatagtgtattttataaatactctgaaatttcttggtctggatttagatggagactctatatgtgtaccattattttcaaaagggagaatggaagagtttaagcagcagtagagacaataatgatgtggctttggctgccaaggacttgatggacaagtattgcttagagacaaatgtaattgcttgtttcaacctgcatgtagaaaaggaggtcatagatgttttagatttacagttagattgaggctatttctgaagaacaaaataactacttctctcttgaatacatttatcatgtttgtttcttaacataaacaaaatcttgaattcataaaacatgtatttaatataatgagttatattgaagcaataaattatgttaaatatagtgaattaatgttaaaaggttgatgagaatgattaattacaaatataaatatgtatagtcagggcagttacaaagtaatctaactatacaataagagcagtgagacttgatactggattatgcaatttcctataaccaggaactgccccaaatttatttaccacaagtccccttggatctcatcaaatgacatcattccaatatgtacaatattattacacggttatgctctgtcaaggactgttctaactgcaatttgatcctgagacacctctgaggaaatctctctatctcacttccaacaaaacataattttccccttctggtaaagttagttcaagtttattgattctagcaattgaaatatgtgacttcgaaaaacttggaataactaagagttgtcaaggtcacaaagtgttttatcagaggaaattaccggtatactacagagatttgctgtcagggttaatttttctcactgaatagccacaaaaattatttaaatattttactttgtaattaccgtactgcacagtatcattcagaactcaccaactggctctctttttggacattttccaaagcttgaatagcatcatcgataaataacacttgttaactaatcgcacactgtcaggtcatgtgtctgaataatttgctgtgtaattttctcactttagtcaaattaaaatgtggaaatgcatatacttttctaggcagttaacttaaggataggtgatacgttaaaattaattatctgccatgtcatattattctaaatttgaatgagtttctcatttgacccaaagatttgcaaacattgtgtaaatatagggcattgactaatttttttccacacatgttcatatatattaaatggaaagtaatgtcttccaaaccttatacaaatttgtttgcctattagttgtggggacttgaggtgggtcaggtataaagacaactagatccaagtaatacggatatgacccagggtttactggggacatggactagaagagcagtagcataatgaacactgtctcccaaactctgattgttctacagcctaggctggatatagatgttctgtgtgcaccacagagatgcttgcctcaaccaacaacctgaacatgcaaagaaaaagctactccatatgtcatccctgcctcttcaccaggtttttgtgtcttcgggttagcctaagaggaaaaagaacacttagtttctgtaagcaacaagaaatacatcaaaggaacagtcttgcaagccaggaatgctgacatcaaataattttctgtccctctgcagactaatcagtcatgatgagccagctttgagcaaaacaacaggaaggggaaggaagtgagcctccaggccgcccaaattggttcctcatcagcccaccctttggtgcttggggtatcattaaatataagcttcacaattagttctgattgatgctacatcttaatgggttccacagtactgtctgagaatagtgtagttttccaagtgtagcctggtatgcttgatagccaggaacaccatttgaacgatattaaggaaaccacaaaaaactggattagatgcaaaaggattgatcccactttctgaggaatttgccttatgagtcatcactaagattgcttgttataaaatatttggagaaaaagataattatttactctcaacccactcccctgtcatttcccaggtttgagcaagtatatgctcacaggaacttaagtctgtcatgaccacttgagaatgaggcagttgattgatcagttttctgaagtgataatttctttgtttagttgttggtgtcatcctaagtgacctctgggggcagaggagggtggtctgaaaaccagctgaaacacaagtttacatttgctccaggtacccttgataggagcatacgatctgtctatccatccccttagatcaaaacacccactggataaaacttttatccattttcagacattgcagatgaatgaatatgtaatggcttagaaagagtcacaattctcacaatcaaaactacaatgacatatattgcaccccagttaaaatggcttttatccagaagactagcaataacaaatgctggtgagaatatgaagaaatgagaactctcataaacttggtgggaacgtaaattagtatatctgcatggagaagagtatggaggttcctcaaaaatcagatttgacatacacacagaaaaaaaacagaactatattattcagaagagaaatgaactatacaattccttctcaaataaggaagagaaggactctatttggtaaaggagtggagtatggcaggaggctcagctgagtcggaggaagccacactgccaggtgtgggagtagccaatgaagacaacaagccaaaacgagaaacagtcaagcctcccatcacttattgccataatacaagcaagaggctaacctggagaaatcaccatttcccctgttccgtgtcctccccaggaatggcaccagaagagggtcaggaggaatagttcaggcgtgaaaattatatcaattgaagtgagaccggtagacctctcgacatataacgactcagcgattccatccaaacccctgcactaagagatgaccaaactctagaatggcttctataatagcagtataaggctgtgttcctgggatgaccccagctctccccctactctacatcctcccctttccccttataatgtcggcctgagaaagctcaatgttgccaaatgaatttactatttgttccatcaaaaacctgctgataagcagataggctgtggaaaaccatcttggagaagctacttcaaaagactgctccattcaggctgctataacaaataccatcgaccgtgtggcttttaagaaacacaaatgtatttctcaccatgctggaggctggaagtctgtgatcacagtggtgcctgttgagagccctcttccaggttgcaggctgcggtcttttcattgtatcctcacatggtgaaagggataaggaggttttcaggtgtttcctttgtaagggttgtaatcccatttatgaggactctaccctaataatctcattaacttcaaagacctcacttcttaacaccatcatagtgggaaagaggtctcaacaaataaattttagaagtacacaaatgttcactccataggcagcttgcaattatgtatcttttttttttaatctcttgtaatggacgtgaagctaacactctaaactgtttcttcaaggacctgagagctatctctgaaatgcaaacattcagggagataacttgttctttcacccagtctctgtgggaggacggggactaactcctgtgggtctgtgcctccttgtcacctgtcattatccctaggtgatgagatggctcactagaattatctccaaaaagcaaaattaaaaatgaaacagggtaccaggatgagtaaaacacagcttatcttgggtttctagtatcatctaagggagttactgaaacacactactaatgcctcatgatactagataaaatttattggggataaatcaagaagggatgtagcacagtgcatgcttttccttattattctacagccttatgttggacatagttgttctttatgcagtttcactgagatcacaacagatatagtttggctctgtatccccacccaaatctcatctcgaattataatccccgtgtgtggaggaagggaggtggttgaatcatggtgttggttttcctcatgctgttctcatgatagtgagtgagctctcatgagatctgatggttttataagtgtgtggaaattcctccttcactctcctctcttgcatgctgccatgtaagatgtgcctgcttccccttctgccatgattgtaagtttcctgagtcttccccagctgtgagtcaattaaacctcttttctttataaattattcagtctcgggtatgtctttatagcagtgtggaaatgtactaattcaccagctaaaaagagtatgtttggactagtaggagtgagaatacctcaacaaagagagcaggctctgttcccatcctatgttgctatctctagcataagccgagaggtcctaggtaacacctatttttttccaagaaaccagaaaatatatcaaggaattcctaggctcaggaacatatctaggaaatatgcatagtgagtatcatgtctattcacagagggcctagagagcagctttgcgtggcaggaacacacagatcagccagaggtgtcgtctctctgcagaacacttactctagtggagccatgtctctgctcagcttccgacctggctaggaaatcatattccagggttattacaattgctttctcatcatataactatatttctcccacatttttactatagccaggaaaaaaaagtcaaggtttaaaaaaatgacatattctgtttgagtttcgatttatttttagtaggctaaaaagaacttccatattgtacttgacctcagttggcgtgtttatgtaaaaaacagggctctttccaccttttatttatttatttacacacttatttatttatcagttcaaagtcttttgctatgtgtgagtttactttgaatgatgttggggacaaatataaataaagttgtagacattgagaattttagaataatgtgggactcagtccataagaaggtaagaaccacaaactatatagggaaatatagacataaattagacaatttcaacactttattacagtagaaatacctagagaatgaagttgaaaaccatgaaagagaaggaaggacctgcttgagggaggaaagggtgtcaataaattcttaaaaagaaaatgcaacacttgaaaaaaagataaaagaagcaagcactttacagatggatgtgtttggaggtgaaattttaggctgaggaacagaattaataaagacttgacattaagagaaaacatatcactggagagtttaacatacttcatagaatgcctggaacacagagtgtgcagagaagagagggttagtgatgagtttaatggatatgcatgacctccatcttgcctcactaataaatttatctttgaattttatgtcatggtcagttgctggtatatttgatgcaaagagaaaccaaaatagaattgtatttagaaagaacacatgggcaaaatatggaggatagattaaaagaaagtgaaattagcatttgagaggccaactgggagatgactctaggaaaccaaataggtgactcttcctttgaatagctttccatttttatcacaaattcacaatttgttacccatttgtaattttacatcaagtcacaattaaattcaactataataaacagaactcaagggccagtgtttggcagtgagattaagaactaaaaaaaaactgaaacagagcaacaagcatataaatatataaataaatggaaaggtcagagttaaaaagagaatatgcaaagtggcttggagttttaaaaattcaaagggaaattcagtcaatgaaaataaattaaagccaaaaaggattatgagcaaactctctgaagttaaagaacccgccctacacactcaccatatttgtaacattcttatccttttattacagcaaacattcaaatgaaaccattaaaatcactgccacagtttgattgcaagaccttatcaaataatggatttgacattatttatcttcaaagactcaacattccgtctaaagccctgaggccttgaatctccactgaagctatagatcatcttcacagatatgactttgatctgatgaccatctttgtgaggaaattttcctttaactagtgtgtgtcctaattaaaacagaggtatctgctgcgattaaaaaaaaaaatcaaggcatttcttactaagatttcatctgaaataccttcatggtcagtggaacctcagagatccaggtgcattatacctgcacgctaatgttttggctccccctggaggatattagtatgtcacagaatttactaagtgacagagtcaaagctagtttcccacaagcaatataaagttgaaaagatgaaagatgaaaggaaacaataacaaaaaatagggggttctgattatatgatagaataactggtactgaatttgccatcccacaataaacaactttaaagctagacggggtatttgagactaatgttattagtcaaaagaaaagaggcaacaaaagactgatcactgagggaagggaaaatcggaaggcaaacctcaaaatcaccctggctcctggtgaaagtatccttaaaagtggcagagcaagctgcattcttagcagggcatggtgttactactggacccaagagcaaaaatcagagttcagatcagcaatcttggatctacagggcaagacactggaaaggaggtagtgtcaaacggttggtaaggaggaggcagaaatctttatgagggcttcctgtgatgaacggcttgacagaatgtgcggagcaagagcgcatgaagcttacagtggagcagtttcagccaaatgtagaacaaagcaacagaaataagagaggtcagacagtgctacagggacatcagaggtctagctcaggtaaaagggaaagagatcgttaatcatctctcaatctcaggtcatcaagtcagagaccatggaaatgctaagagtttagagtagaaacaatgcccaaatcatacgtattaaaatgagagacaccattaggttagaagtaaaataataagcataaaaatcctagtgactatcttattacgatacaagtagactttataaaaaaagaatgagtcaagaaataaagacatttcatcataataataaaggaacaattcattagaaagacattattttctaaatatgtatacacctaaaaacagaacttgaaaaatgcatgaaacaaaactaacagacaaattctaaaatttgaggacttaacatttcttctgtcagtaattaatagaataagtagaaaaaatacagcatgcatataggagatcataacaacactatcaacctacttgacctaatgaagatttacagaaaggtatgtccaacaattacaactctacaggctttagaaatacacacagaaaaaaacatatttcggtccataaaacaacgttcaatgcatttcaaattataaaaaaatacagtgtttagcctgactcaaactgtattaaattcaaaatcaataaaacaagaaacagaaaattccccaatatttgagaattctatgacacatttctaagcagcccataggtaaaagcaaacatccccaaattatttttaaaatattataaaaaaaggaaaactcaaaatatttaaatatataagatactgcctaaatagttcttagaagcaagattgtagatttaaatgcctataatttaagaggaataaattttgaaaacaattgtaggagctcctacccaataagctcaataagaacaaattaaattaaaaataatgggcagtaaataataaaaataaaaacagaagtcaatgaaataaaagacaagagtaacaaaaacaaaaataaagcaaagtaacgtagttctgttgaaggtttaataaagatgataaacatatagtgagattaataaagaaatattttaaagagaaaattaccaaaataagaaataaaaaccaggatatcaaaaattgatcattcagatattaaaaggttaaaagaaaactttataataactttgagtacttggatgaaattgacatatttcttgaaaaactcgactctacaaaattaaagaacaaacatagaatctaaaatgacatatatctgttaagaatattgagttaatgatcaaaaccatctcaaatatatacaaatacgtatatattccaaacagagagggtttcaaaaagtacttctttataacatttagcacttggagtgcagtgtagaaaacttacctcccttcagtttcctgtacttttactacttttaaataacattgtcttgagtataggatagtattataatttctcttttaataataaaatgttataaaactcatggggagaatgatatactgagttcaatagtgtctctcagaaaccaaaaaccacagaatgtggtcatatttggaaatttagtctttgctgatataactaattttaagtaataatgaggtcatgttgggttagaatgggctctaatgtgataattgattattttcaaaagaattgaaaacagaaacacagagacacagacacagggagagtgccatgtggctatggagatggagactggagtgatacacctacatgccaaggaatcccaaggtttgccagcaaccaccagaagaggcaaggaacgataagagagaacatagcactgctgacatattaatttatggcttctaacctccttctctctgtgagagaatacgtttttgttgttttatgccacccattccacggtactttattacagcagccctaaaaaacaaatacaaagttttgcacagataagtacgatgcggctgttataaatatcaaaaaatgtggaagtggctttggaattggaaaatggatagaggatacaaaagttttgaggtgcttgacagaaaaagcctagattctcttaaaggaactgctggcagaaatacagatgttaaaagtgatctagtgaagactccaaaagaaatgggtacagctacagagaatgttctcacatcattgagaacgcatatattgtcacgaacagattgttggtaaaaatatgaatgttaaaggtgcttctggtaatgcctttagaaagcaatgaagaatgtgttattggacattgaaggaatccacgctaaaaagtggcaggaaatgtggctgaattatgtactgttgttgggtagaaagtagaatttgtaagtgataaacttagatatttaggtgagatttcctagcaaagtgtggaaggtgcaacatggtttctccttgctgtttatagtaaaatgtgagaagaaacagatatgttgaagaagaaacagccaagctaaaaggagcaagcatttggcgatttgaaaaattctctacttattcagacagcatgctccagaggcaggatccaagtacaaccatttgttaaaaaggctaatcatgggacttatgctgccaagcactatattaacctctcctagttgaactggcatcagttcagaaatattgaatcttaaattattttcccacaagtccaagtccttgaagggctcttcattttccttccaatgttttatctctccatttttcagattgggtaaattctactgatctgtcctctagttcaattattatctccactgtactcttgagcccttccatcaagttttatttcactgttttatatatatatataatttctgtagcttccatttgctcttttttatattgtctaccttttgctatatttttaaatttgtttcaagagaatgtctaattgttgaagcttttttttattactgctgctttaaaatactagacagataattctaatacttgatgaatttcgacattgatgttatgtgaatgccttttctccaagttgttattttcatgactcttgggatgatgggtgatttttttttgctttaaatcttgaatattttggttatgttaggaaagtcagggtcccagttaatattttattgtagtaggtattcactctgttcaggtttaccacacaggttctggtctatattgttcagctgtgcatcccatgaccatttaaattgcggtggtcactatcggtggtgcctgagaggacagaaggtgtttacgaggctgggccatggtgggaaagtgaggatttggcctgggagaatgaaaaacacttcctaagcaggaccactcatgtgagcagatcccctttgtgggtgcctactggctattcagtatttctatgtgagggaggaaagacttaggcccatagggaccaaaatagtctttctgtgctcaattccctgtggtgggatcccttgccggcaggggccagagagttctgccctggcctggtgcttggtttggtgaaatctcgcttgctaatgacactagatacctgctatatctgtcatgaggagaggagtcgcaggccctgtgcggaaaggtagcacttttccatttgatttttgtcagtggggttttgatcagtccctctttccagtactactaggttcaactgatattgctggcaggactcctgtttgatctaggtgagtggtgaaccaagctgactatattttcttgctaacttggaggttgggcaacatcaggctgagacacatttttgtgttggctgaggcttcacaagacatcctaatattatgctattcctccagtccttgtagtctctaacattcacttttctctgttcacagttctccatttgttgtctattgcgttatttccagagtgtattgctgtacttggcagggatgagcagggagaaatgagtctataacatcttttctaaaccatagttttatgtttatatttttacaacatttaaaaaggaaacaatactaaaacttcacaaattctttccagaaattgaagaggaagaactgcttgtttactcatttttacaaagccagcataattctaataacaaacacaacaaataaatctaaaaacaaaagttaaaaatatcctttaaacacaaatggagaaaacctcaacaaaatgctagcaaaccaaactgaaaaacatatgaaaaatttaataaattcatactaagaaagttttatttcaggaattcaattttcagcattctaacatcaacctctgtatttaatacattagcagaattgaaaaaaaatgcaatattgtttcagtggatgcagagaagggaaaacatcacaaagacacatacagttttgaagatgaaagggacataatgggaactattttaacagttatcttacatggaacaggttgtctgttgtttattcaaaaatagaattattgtctttttaatggagatctttaaatatttatgtgttagaattaatgaaacctagaattctgttatccagatgctgttgtttaggaggtttgtaatattgacatcatactctcttaatttcacttttatttgtaaaatctctataagtgtttcactcattaaaagattttgtaacaattaatacaaagtgtatgcaatgttcttagtacagaaaaaacacttgctcaatagttaatgttgttatttatttccattcttaatgtcaaatttatagtaggtgattagttatatttatagaataaatacaggcataaataattaaatgaacaaataatataatttaatctcaacataattgttcttttaaaattattcaatatatatttaataactttagaatgtttttaactcaatgaagattttgcagagataataactatatactgagcccaggcattgtgctatgtgctggggataaaaaagcatttcctgcctttcttattaaaacttgtaaaacagaaaacattaataacaagtgataaatgatgagatagagtagagacatctaaactagtttgaaagctcccaaaatcactttttgaaagagctctgaaaggtgaagtctgaagtcaggcaagaaggcttctcctagcattgacattctcctgggtctctgcatgtggaaatgctttgaagcaaaagaaggaataaaaaatgcaaagaattgaatagtacttagttattgatggagcatctatgacaacaaaggagcagcaaggtatttccaaacaggtcaaggacaaagaaatgaattgcaaaaattgccaatgatctaatcaccccaaagcattagaaacattaccgaaatatgggccacaaacatgaacagggaattcatgaattattataaaatctgttcatcattgaagaaatgaaaagcaaactactgatctggtagtttacagaatgtgaatatacagttggcccttgcacaacacaggtttgaactacgtagatcctcttctacatgtagttttttcccacctctgcgacccgtgatactgcaaagaccaacacctcctctttatcctcctcctcagcctactcaatgtgaagatattgaggatgaagacctttatggtaatcacttccatttaataaatagtgaatgttgtctattccttatgattttcttaaaaaagtttctctttttagctaactttattataacaacacagtatataatacatacaacatacacaagatgtgttaattgatactttatgctatcggtaagtagcaatatacagtaggctattagcagtatactatataacagtatatagtatatagcaataacagtaggctattagcaatatacagtaggctattagcagttaagttttcagggaatcaaagttacacgtggattttcaagtgtgtgtgtgggggggttgggttcggtgcttctaatctctgcattgtttaaggatcagctttatatatcatgtatgaaatctcaaattataaagacatgatatttgataatgctaagtgttggcaagggtacaatgaaacagtcgctttttcacagtactgataatagtgtaaattagtacaaaccttatattggacaatttaataacatccatgaaaacataaaatatgcctagacattaatttagattctactgaatactctatattatagacatgtaatacagagttatatgcatgtgagggtgacatctaaataagtcactaggagataagtaaataattactttatataatgtcttaaagacaatagaatatcatattatcatcagaataagtaagataaaactatatatgcccatggggaaagattttgaagatacatgattacctgaaaaaaagtacatgtgtaaatatacaaacaccatatttatatatatatatatatatatatatatatatatatatatgatatattatctgcttttgtttgtgtggttatacacacacacacacacacacacactgatgagtatatttctctgtatatataatcatataaagacacaaaataattttttaggcctgttcatttctcaaggagtgaatctgatatctttgtggtaaacagaaaacttatttatactttaaaatatacctcttcactatgtttatgctttactctttgtaagataaatgattttaacaatgaaaaagaagctgaagaaattaggaaatgcaagtaaacttgttaaatagatctgctaaaaatattgattatgactttctctctgaaattttatttgacctgattaaaatggcttcttggaagaatattgaagaatttgattacatttcacctattccctggaattaatattcagaaaaggatttcataatattttgagtcaaacatttgagtcaaacaagaaaatgaatataatcgtacctctgactgttcactgggcctcaagattgtttacttactccttagtgatcttggaaaatcatgtaacttttatggttttcagattgcttgtatgtaaaatagaaacaatagtccaaagtactctaaagtgttgcaaggtttattgtgtaaactactgaattttaaaactgctttacaaaactgactacatagttcaactgagcagagaaagtaaagttgacagctggaattctttataaatttttttgagttgtcacacttagcacaattggtactgctgatactaatattacctacaggatacaggaatccaaatgcatttttgttgtaggtttattgtgtacttacaatgaagaaaataactgaacaatttcaatgctatgcaaatttgtactaatttttataactaagcctaacgatgtactataaaattaacttatgtaatgctaattaaataaatcatactagtttttaaatattacactattaatatttgtgttcaaatatagaaaatatttattttatgtgcaagggaaccatagtgttttactgcagaaggacacagctattactgcatctgcaggactaaaacgcctcctacaaaatgacccttccttctttcctccatacttcactttggaactttcatccagagcactcctgaagccatagatctttaccgcctcattgagcagaactgattttgaatggcgcttggtcacaagctgatccagacagaggtgacgaattactgctgcatgggcacatgttaacattaaggaggaagaaatcaacatttttggatgggaggtcaacagaaaagtacaaaggagtggctgtttttgtcattctttaaaagagtaatcaaaggaatgttatataaatattgcattatttgtttaaagggatttaagaaaaaataatgccttattgtgaaattcacaaacagtactaactagacaagagaatgtcaaacaatattacagacactttccctacattttttattgtgttttacagaaagaacacaaacataaataaaaatagaggataatgtaatctgtaatctcttattgagaatatcgtaagacatttacagttattttgaaatacctgcctttgcaatctaattctacaaaagtctacaagcttcaacaaggttgttatgactttgttttgagccctggacttgctgagctgaaacagaacaaagatgtagaaatgacattcacacctcttaattggtatcattaagagaattttttttcatgccagaggacaagtgatagacctccttgagattactatgctcttgggaaaacggaaattgtcttctaatgagaacacaatgctgtagctgttataaaggtaccagttagcatttgctatacagaattctttaaaacagatattttgctctgaaaggattctaagtagttctggtgacccagaaagggaaaagaaagagctgtgagaggtgttaaaatggttcatgcaatttgaagagataatagaaatttgaaggaaaaattgggatttcgtgtgtgtgtgtgtgtgtgtgtgtgtgtgtgtatctgtgcatgggaattggagagaagtttaatggaactcttgtgatttattgtaatgcatgtcacagtggaaactgacatctactgcaaacttgtcatgaaattagtaaggtgataaatatcagagatctaaagtttatatttttagtaagaataattcttgaagatacactcatgtaaaaatggctttattatatctgtgaatatcttaacaggtatttaaagggagttattcaatctgtttaggagctattggattattcatgtgtgtgtgtgcacacatgtatgtatttaaaacatagagtgaaccggccaggcgcagtggctcacgcctgtaatcccagcactttgggagggttaggtgggtggatgacaaggtcaggagttcgagaccagcctgaccaacatggtgaaaaccggtctctactaaaaaaaaaaaaaaaaaaaaaaatgcaaaaattagccgggcatggtggcgtgtgcctgtaatcccagctactcaggagcttgaggcaggagaatcacttgaacctgggaggcggaggttgcagtgggccgagattgtgccactgcactccagcctgggtgacagagtgagactgtgtctcaaaaaataaaataaaataaaacatatatattatatataataatgtaacatatattatatagtatatatatatatagagagagagagagagagagagagagagctaacctccttacccttcttcaagcaattatgttgtttcagatgtatgtgtagcagcattatccaaagggtttgcaaccattgtgctccatatgtaactgaggatcctcacctattgctggcttttgttcttgcactatacccccacagtgccagttcagcataataaaagatatgtcccattttaaggatcagtggaaatcttcagaattcaaacccactgattcatattgattttcctcttctaaaatctcaataacagagggcacattaagggctttctctggatttaattttcttcatctgcaaaatgaaagcactttagatacatgttttttcaactctccttcactctagccatctataattgccactagtctagagtttggaatagagtacctaaaataaaataaaatatttacttaatctgtactttattctttcctctgcatccgtaaaggtacacaaataagaagagttttccctaagttttcaattcaactaaatttgatttttcagaggccagaaaagaaataatcctactaaaatcaaagcattgaccaagttaaactctcagcaggaattgaaccagaaccacccttaaatggcaatattgtgctcttttttgtcttgccagaagcctgtgttattcagtgtagtctaatgaatgatgagaaccaagacaaaataatggcagtgagaataaagaaaatgtgacaaaattgaaaaaaaaatctaatttggaggtttattcaaatgggtgaatgaataatgagtttcatgaatttgaagatgaaaatattctagaatagctatcagatttttgatttagataagtcaatatatctggattggtattaaatatgtgtttcctattgaaatcctgtaataataaatcattctcttctttattttaaaagttaacaatccactgtgataatgactgaggagtcagaaagatggaaatcaaatgtcatttttattactagagtagtcccaccatatctgtaggaatacatttcaagaccactagtggatgcctgaaattgcagacagtaccagatcctatatgatttgttttctcctatatatatttacctatgacaaaattaaatttatatattaagcactgtaagagattaacaagataactaacaattaaaatataacaattataacaatatactgtaataaaagttatatgaatgtggtcgctctctcaaaatattttctcataccgttttcatgtatttttggagtacggttgatcatgagtaactaaaaccatggaaagccaaactgcacgtaagggaggactattataattaaaattcaaatttaaatatggggccaatgaatttgctgattaatatcttcctgacttaaactgatcacccagaaatcttgtcacaggtccaactgggcaagaaagagtttcctctgcctcctctcaagcaagtgctttactgcatagcaaaatagcaaagcaaaacaccccttctctatgggcaagcaaaattctgaaagaaagaagttcaatatctgttaacatgtgcaaatacttagagacatatacacatatatacacaaattcatatataatatagataaaaatcttctaaaatataaacacatatgtttctgtatgtacgttatgtacatttttatttgattttgttttcattaagggtgatgtggtttggatctgtttctccactcaaatctcatgtcaaatcataatccccggtgttgggggtggaaccttctagaaggtaattggattatggggatgaatccttcatgaatggcttggcaccatccctttggtgctattctcatgatggagttctcacagatctggttgtttaaaaatctgtagtacctcttctctttccctcttcctccttctccagccacgtaagacttgccttccttttctttgccttctgccatgattgtaagtttcctgaggccttcccagaatctgagcaggtgccagcatcatggttcctatatagcctgcagaatcatgagcgaattaaacctcttttctttataagttacccagtctcaggtctttctttctaacaatgtgagaacagactaatacaaagagatataggaattgtcattttattaatttgacattagttctctgatgtattagaaaggttcattaaaatgactcacttaaaatttaacagatataaatatgtaaactatatatgaatctacagaattttaaaaggaattttgaataatgatattttattttctaaccctagtaaaatctgaaaaggggaatttcactgagtgtcatggtatgaatgtttgtttcccaccaaatatatatgttgaaaactgatttccaatgtgatgctcttaggagatgggcttttgggaagttaggtcattaagatggagccctcatgagtgggatcagtgtccttataaaagaggcctcacagagagcttccttgtgcttctgttatttaagaacatggtgagaagacagcatctatgagacaaaaagtgagacctcaccagacatcaaatctgttgccatcttgatattagacttcccagtctccagaatgtgaaaaataaatttctgttgattttaagctactcattttatggtattttattccagcaggctgaactgactaaagcattgaattctataagtctataggtatacataaattagtgtattaaggatgtacaacatattttatgtgtcacattgatagtaaaattgaaggctttttctgaataaagtttgctttaaatttgcactgagttccagtaagctcatacactacctattatattagaaatttgaatttgtagctgaatatttcctaagttctttgattgagactgacacttgtgcttttacaaaagatgcaaaagaataaaggatttatcatatacaaacatcactgccttgttattggccatctttatacgggactgaaataacaaagctggatggaaaaaaatatgagtcatgatatcatatatggtttcttacacatatttcaattcaagaggcacaactaaatttcaacaaaaactccctgggtcttctggggtaattcccattaatcaagtagattttaagaagcaagaaccatttgactatagttttgattagaaaagtcagcgtcctaaggttgtagtcactaggaatgggaacataagcctggacaaaggcacgaacagagctgccttcttaatgacttttctattttggttgctgggtttaactaaatatgagtttttaatgttttctggaattatatatatatatatatatatatatatatatatatatataatcttttgattctcgattctcatttgcttcacctcatatatgattttattcaatcactttcctggcatatccattacttttctactttttcagtctcttcctctgtgtactctcagcacttcctaaaatgcactttttagtatttttctctgttttactcatgcttcttttctttctcaccttttgttctgagttaattataatccctcaaagagataattcaacaaactaaagccaaagctagcagaataaaataaataatatatatgcaaacagaaggaaatgaaattgagaacaaaagaacagtataaaagatcaggataaaagatggttctttgaaaagataaacaaatttgacagactgctagccaaactaagcaagaaaaaaagagcgaagatccacataaacaaaatcagcaatgaaaaaggagacattacaactgatactacagaaatatatagcatcagcagagatcactatcaacaaccatacactcaaaaactagaaaacctagaagaaaactgataaattcctgaaaacattcaacctcccaagattgaaccaggaacaaatagaaatgcaagttaataccataagatattaccttataccagtcagaatgtctaatattaaataggcaaaaaataacagatgttgtcaaggatttggagaaaagggaatgcttttacactcttgatgggaatttaaactagtatatcctttgtagaaaacagtatgaagatttctcaaataactaaaaatagaatagattcagcaatctcactactgcgtatctaccttccaaaaaataaatcattatattaaaaaacacctgcacttttatgtttattgcagaactattcagaatagcaaaagtatagaatcaacctctgtctatcaatggatgattggacacagaaaatgtttgtacaagttcatcgacactggataaagaaaatgtgacatatatgcaatggaatattatatagccataacaaaagaatgacaccttgtcttttgcagcaacatgattggaactggaggccattaacttaagtgaaataacttagaaacaggaagtcaaacaccacatgttctcacttataagtggaagctaaataatgtgtacaaatatagagtgcaaattaataaacattggagactcagaaaggtgggaggatagaaggcgataaggaatgagaaactacttatgcatataatgtacactatttgggtgatggttatcctaaaagcccagacttcaccagtatgcaatatatccatttaatacaactgtacttgtattccgtatacacatacaaaattaaaaatatatatataatacaagttctaaattctaacatctctgaatatgaccttattttttaatagggggcagacctgtaatcccactactttgagaggccagagcagaaggattacttgaagccaagagttcaacaccagcctgggcagcaaagtgagaccccatctctattaaaaaaataaaaagcaaataggatcttcacagatataatcaagttattccttatatatacacaggattagagtgatccctaatctaatgcctagtgtccttataaaaagagaaaaatttgcacagagaaactcaaacaggagaagaccatgagagatggaggtggagattgtaatgatgtgtctacaaaccaacaaatacaaagggttgctggtgatcactagaatctaggaagaggcaaagaagtttcctttcttagagacttcaaagaaagctttgacttgccgagaccttgatttcagacttttcgccttttaagagtgaggggataaatttatactgttttaagcaagataatttgtgatattttgtcacagcagccctaggaactgatacacctgccaaaacaaacatgtttataaagttttgactattttttgcaattatgttaaatgaactacactgtgaaatagacaaaattaatattactgtactacttcttcttatttgactttttatagaagaaaattatatctactctaagggacatagacatccccaaatatgttgagatgaatattattcctatttgtgaagtttgatattgataataagaacaatgtcagacatgtatttgccaactgagtgcaacttttgctcaatcatatgtatatatgtttagaggctattattccttaatattatcctcactcagtctttacctaattcatggtgtaatgcccagctttttttccatatgcttagcaggacaatcactgttgagggactgattttttcctctgcttttgcactacatatctaaactggctagttttatttctgctaccaggcttgtggttacacctttttacatatgactacattttacctaaaattaaaataaattttaatagagaatgaaaaatttcttcctaatagtgagctttgtttacttgcagattgtgaagagttttagcaagttatattgggtttgaattttaatccttaatacaatttatctcctgctgtaatagacactttgctctgaggttatttttgggttcacaagggaatacagacagaggactgggtcaaggatagtagtgacagaattttatcagttatcctgaacttggaggaaggtagacactaggcgtctcctaatatagcagaatgaaagtggccagggaaacttctggatcttgggatggtttgagcaaagattttacccctatttgtgaggagtgacctgaagtgtttgctcaatgaggtgtgaccattagctccaatacagaatggaagtccactctcttcatctgattttggagtgaaaagtttttttctactcaaagaccccaacttaactgatcaggtatatctggttttagagctaaaatcacctcagcatgctagttcactgttcttttttatattttgagtaattctgaaattgttgtctttatatcctataaatgaatatgcaaatgtctaatttttacatttaactgaacatatttataaatcatattaacaatgctccacaattcattcattttaatattataattgacaatcatatttaacattaaatataatgttaaatttctccatactttggtaattatcttggcagaaggaaaaaaacttaggcaaaaatacattcttacaactttggatatatcaccatattcaaatgctttgtagatgggttatgtttaattctgaggaagattattttgatgaggagaaaatgtccaaatgaacttttcaggatcctaagttttctgtaattcaattattttaaatcaagaaaatattctgtttactgaagaaaagtttaaataaaagcagattaggtgttgtggcatacattaaagtagataagattaaaatatgttttttcctttaataaccaaaaccaatagtgtctgtttctcatgttagtgatccttcattcaatgagaaagaagtatgcagatatttaaaatatttaaatgttttctgaattataatttgggagagatgacaaaaagttacatccagcattgcatacagtaaatattctaaaaatgttttaaaaaacgtagactttaaactctttgacagataatagtaagtcctaaaattggcgaatgtcctattctccaccttctgcatcacaattgtgttaacttatggttccttgttttcatttttggttttgatgtgtttatgaataggagaatgaatattcaatatgaagtttataacttgagcaattatgttctctagactctatttctgatttttacagtgtatgttaaatatttcaattactgagtcaaatatcctaagctttctcaaagatgttaaaatataacaacaaaagcaaacaacaacaaaactgagctatcttggatgtcaaaggcatatggcatattttttatcaaggaggaagaatattgtgcttttaaattattataatactacacattgctagtggtgaattttgagcttttgcaaataggagaaaatatttttatatttactagatttaggatatgctacccaaaaatataatactttggcatattggatattgtaagctgaataaatttgagaaatggcaagtgcaggaagaattttcctaccttgcactgaagcagatcataagatcctcatgtgagaaatgtcctctttacaccatgggaaagaagtgaccttatctgtgaaggtggaaggacaccaagaagaatctgaatgaacaggtattgtcaagtttccactagtttactacacttagctcaaatcctgttgtcttcttatgttttcccatgattccacttttcatcaaacttggtatacaaacactcagtttgacagttcattttggtctccatttcctcatcaaggcccccatgtcatgtaaaatttgtattaaaaaattttttatgattttctattgataatatgtattttgttactggggcttcagctgagaacctaaaaggatagaaagaaaatatttttcctcctctataatattttccaaatttttctctaatcaatttttcttgactgaagattgtaatttggtgacaaaaagaatggccttggtagtatatacagccatgcgtcgcttaatgatggggatgggttctgagaaataagtagttttggtgattttgtcattgtgcaagcatcacagaatgtacttacacaacctagatagtgtagcctactacatacctagattataaggcatagcctattgctcctgggctacaaacctcaacaagatgttattgtagtgaatattgtagacaattgtaacataatggtaagtatttgtgcatctaagtgtagaaaaggcacaataaaaatactgcattacactgtcatatgccatccattgttgacctgaaacatcatcattacatggtacgggattgtatatatttcccaaaatagttatactatatgtcataataaattctgattattagtgtttttaaaatgtaaatctgataaaaatatttcctgagaacatacaatgtgacaggcatggctctacgtatttgggacttaacactgaagagaaaacaaaggtcctgaccttgaggaattctggaagatgaaagagtccataactatgcatataagtatgtggcacacagaaggatgaagagagtgatagggaaaggggtggggaggtaaaggagaagttctttggccctagaaagaatggttggcatgtagtgggtggtggtggtggtggtggtggtggttgtggggtgtgtgtgtgtgtgtatgcatgttggggagagatggtagagctcattgggtgggtaagatttgaatcaagatctgaataaagttagaaattcagtttttggaggcagaacagctggaacaaagctcttatgtagagaagttgactatcatatctgaggaatagcaggaaggtcacggtgaccaaaatcgagcgtgcaagggtgggattataacagataaagtcaaagaggtaacaggtgggctattgtagagaactgacgatcataatgaggactttggctatttactgtgattgaaataaggagcatttacaaacttttgaaccggtttacattcaaaaaattctcactctagctgctataatggagaatagagtttaggaggacaagcgtaaataatggaagacatgttaggaaactactgcagatatcaaggtaaaagagtactgtggcttggggatacgggccatcagagatagaaatggtcagaaactaagaactgcgccagcatgattccctaatgcagaaatttcttaactccatatagatgcagctttaaagcataaaacaggacgctaaaataattaaagtaacacactgaaatatttattaagtaacaaattgctattatttgattagtgtccatatatttctatttaaaatactaagtaaaaattccttttaaataaatataaaaatctgtatatgtaaaactaaaattaaaaaatatgtatattgattaactgaacattgaaacataatataagcaaaataattattcttcatccatttctatatatcgtaatcagtttttaactatattttttctataatgttatgtcttctgtgtttcttaaagcatatttttaaaaattattgtgtattttttattttatttttctataatttcctgtaatcaggtttaaataattattcttatcttctaataattttatcttcagtcctgacattctgcatttttatggttaatacgtttaaaatcattgcatgtaattgattctactctctataacaaaacaaatttcactgagaaatcattctgtagagactttgagagacccgataaactaagagaaaatgctgccagaggatattccctgttctacttttttcattttacaacattaatatttccatcaaaatattgttatataggctatcttgccattactgatactatcattttccaagaaagtttttcaagttaaagcttatcaaataatctctattatttgaatatattacaaaaaaaggtattaaaattattgtcgattttattttctcccaaacagtacataaattaatccagataaaaaaatagaagctctagacaaagattcttgccacaaatatattatcttttagtttgtttttatagttccagttttcttgtttgcaatccctttttatagtgactgaattattctaacagttttgaaagtggaaattttgtgacattgcagttagtgaacactttgattaaagatgtacaactaatttagaaaaataaaatgaaatttaaattaaaggactcatttgcaataatactcaaaaccattagtgggacatttgggttgattttaaagtaattcttcagattttctaatgtctgctttttaatgaacatcaaagaaagaaagctatttgcaatgctgaagactattttgcatttaatatcagcgttatcaaaatattgtggctcagtaccacgaatgtctattttttttaattatatgcactttgacaagcacagcttttattttaattggcaaaatattgatgcgtgcttgggcacaatataagttaggtgtccatcatcctcaattttaagttcaattttcttgcactgatttcttttctttctgcttttttgttttgctttgtttttgttttgttttgttttgagacagagttttgctcttgttgtccaggctggagtgcagaggcgtcatcttggctcactgcaacctccgcctcccgggttcaagcgattcttctgtctcagcctcccaagtagctgggattacaggcatgagccaccacacctggctaatttttgtatttttagtagagacagggttttaccatgttaggctggtctcgaactcctgacctcaggtgatccacccacctccgcctcccaaagtgctgggattacaggcataagccaccacgcctggcctcttgcattgatttcttactctagtatttgtactattaattcaagaactaataattttatcttcaatcctgaaattataaaattgtttacaatttacaataacattcaacatgtcagatggttcatctttgatagaataaattctaaacttgtactttcactcacttaattgaatttaaaaatatcaatctattattggagtttacttaatcgatttcctatttgaagcactttataatgctgaagaagtcttcattttactgtttggaagttctgctaaagaagctaccatattaggaggtattggttcatttcttcatgcacaagagaatattagaattaaataatgatataattaatttagaagatttgtaatttgatctaaataaaaattcttgcttcacaagatgatatgcaaacgtatctccatggctagaatttctttctattgtcccttgtgggcataaacttttttaaaataccgactttaaagtagaaacgggatagacatccattttttttttctgcttttatgtggttaatagtaccagtatagggccgggctcagtggctcacacccgtaatcccagcactttaggaggctgaggtgggcggatcacgaggtcaggagatcgagaccatcctggctaacacggtgaaaccctgtctctactaaaaatacaaaaaattagccaggcgtggtggtgagcgcctgtagtcccagctactctggaggctgaggcaagagaatggcatgaacccgggagatggggtcatcgagaccatcctggctaacacagtgaaacccatctctactaaaaatacaaaaaattagccaggcgtggtggtgagcgcctgtagtaccagctactctggaggctgaggcaagagaatggcatgaacccgggagatggggtcacgccagagcttggacgtgttttgctatttgtgagtgagagctgcttgtttttccagtgagcatcatgcatggtatgcttgaatgagaagtgttagttactttaaatttggaaaactttgaaaaaagagagatgcatatcactacacagatttcaggtataatacatgttcaattgataagtctattcattgcacatacatctcgatcactgataaagaagatctggaagaacttgtagttcaacaaaacccagcgtgactaattttaacacaactattaggaagctgatttcattaaaaatgaaaaatcttactcagtagctaaattggaaaagacattgggaaaacatggataaacctagcatgccccaggcaaaacagtttgtatggtcacactaggaataaaaggaaaaaaaaagtcaaattttactgtctatatttaaaataaaattaaaagaaaaaaactgaagtcaatgggctctaagaataaagctagaccatgattccatcaaaaagtctttgttgattaactcacttgagagatcaacaatactgaaaccaagtagcctcacatctgtgaggcaaagatagagacgaagatgctggatgtcctctggccaagaacattgagcactttgaatctgtatttttagtggagttataaaatagattttcatgatttcttacacaatgggaggaaaaaacaaaaacaaaagacccagaacaaagaatctgataggcagcagatgtcctgagaaacatccacaaggcagatggcagcaatgtgtcaataacaaacagacctatgggatagaaacagcatgacaaatatcatatggaagaatttacttaactatttcacattttctttaaaaaaagtcatgacttatgattacctagatagcatacagatataataacctgtaggggaagaaggaagagagagataaagaccattgggaggaatacagaaataaaaatctatattggatgctgtactggtcagcatacacatgaccagctttagaatttgatctatgatctatgtaaagttgaggtggaatttctttctttttcttttttttttttttttttgagacagagtctcaaaaaaagtgcagtggagtgcagtggtgcaatctcagctcactgcaagctccgcctcccaggttcgcgccattcttctgcctcagcctcccaagtagctgggactacaggcgcccgccaccacatctggctaatgtttttatatttttggtagagatgtaacagagtttcaccatgttagccaggatggtctcgatctcctgacctcgtgatccacccgccttggcctcccaaagtgctgggattagaggtgtgagccaccacgctcggcagaggtggaatttctatatgttattcaatgttataaaaacttttattgtcaaacatattttaaatatattttaagatgtatatcccctttcacttgttaacaaaatacattgcctataaatatatggcccatgcctctacaatataacctcctttccccacctttcccacaaaggtgaagaatctcagtatcttctgaatttcatttttaaaatgtcctgtcttgaaaagtgagatttagaatgaggaatctattttctgacttacaagttcagaaggtcatccactaaaatagtttgaaaaaaaatccacctgcttgaaagaataagccatatctgtttaaatattgaaacctgattagatcatgaatagccgggcaatagaactcagtgagaagacaagggagaatgtttagaaaatggattcaccatttatccttacacatagcatacatgaaacattttatttgccttgaaacaaatatatttgccttttaaattgtttcaccagttttcgtgtagacacatcagaaatgttataattatttaataatcataagttccctttttaattttaaaaccttttatatatttcagttataacaccattgcaattatttaatgttttaactttatccaaaatgccaataacttcactgtataaaactatgaaagagcatgatatccacattgtaaatggaacattggcattttgtattaaaatgtcaccacacaagttgtataaatactaaattgctcaggacaaagactaaatcctcactgtattttggcaagtggcaatgaactgatcattcatcgggacttgctttcttcaaatactaagattgactactacagaaaatatgatgggctaattttcaagccaactgcctaaaatgtacaatttattgaacagaaaacgtgacttttttgcatttcttctttagctatcttcattacctttattttaaagaaagcatattaaaagagcaggatgattacatggttctatgcattgtataacttgttggaaaccttaatttactgacatagaattaagtttgtgctgtatttacagataaaaactactagcataaatttatattttcaatagcttttaaaatttggctatttgcttgaatagtttataggactggtctacattttattatataataataaaatatttaataacatttatcaataagtcacatgatattctaataagatactctgagaagtagtgtcaatattatttgaaaaatatattgtatgacaatatttcagctaaatataaaattttatttacataatgattaatattaaaaaataaacaggtctcataacaggaatttctgtcgaataggatttatcttcctttgaaaggtccaagcattatttggaagtttaaacaaaatagaacttcatttttataaagtgggcaaggtacctcgtttacagttttaaaaaatcaagattttaaaatatagatgaggactaacagttctgtgagcataaggacagtgctggatatcagttattattttcattttattgtattagtatgaacttggtttggccttgactaacggagacttaatagtgacttcaataaaattaaagcttatttctgtcataagcagcatccaggtgtggtgtgtcacttccatgaatatcagggtctctggctcccattttctttctgatgtgccatccacagaatgcagcttccacctcgtgatgcaatatgtttgttcttactgaagctgtaatttcagcattccaactaacaggagggaggaaaagcctataccctctctctttttcagacacttcatagaatttatattaagtgatttatgtgtctcccaaaccacaaataagtccaaggccacacagctaactttgagaaaggctgggtaacgtaatttattttggtacccaggtgtgaaacaaaaatcaaaagtttttacaatattggaaatattggaaacagaagtacttaaaaatcaagtaattttttagacaatttctaaagcctaaaataatgatactaatagaaatgtgtatatagatattaaactcatacattgaatcgaccaaatttggtttaatttacattcttaatattctctgtaatctttttcttatatgatttgaattgaattaaaaaaatagttttcacatgaatttaatgtttaaccaaagtttcagtctattttcccttgatttatatttgtcttgaagttgtttataaaattaaatcattaatacttcagaataggtcaatctttactcataaaatgtttcatctagtacagtgtggtgattcaggaaataagctaggtgccgtggctcatgcctgtaatcacagcattttgggaggccaagacgggagaattgcttgaggcagcatttcaagaccagccttgacaatatagcaaaatcctgtctctacaattttttttagaaaaagtaactaggtgaggtggcaagaacctgtggtgccacctgctcagaaggctgagggaggaagatcacctgagcccagaagtttgaggctgcagtggactattatcatgctactgcactgcaacctgggcaacagagtgagaccctgtttctttcttttttttttttttacataagtatcttttttaaaaaaaaatttattattattatactttaagttttagggtacatgtgcacaatgtgcaggtttgttacatatgtatacatgtgccatgttggtgtgctgcacccattaactcgtcatttagtattaggtatatctcctaatgctatccctcccccatccccccactccacaacagtcccctgtgtgtgatgttccccttcctgtgtccatgtgttctcatttttcaattcccacctatgagtgagaacatgcagtgtttggttttttgtccttgcgatagtttgctgagaacggtggtttccagtttcatccatgtccctacaaaggacatgaactcattcattttttatggctgcatagtattccatggtgtatatgagaccctgtttctaaacaaacagacaaactcgaactctagttaatgtaattgaatttcttagaatatcactatagcagacaaatcctaaggaagccccattatccagccttctgatactcaagttcttatgtaatctccttcccttgagtgtttgtggagcctgcgcgtggcttctaacgagtagaagacagcaaagttaatagtaggtataggattatgtgtatgttattatttgattacctcactaatttataggcaattgcaatccccttcttacaccgagactctctttcccttgttgactttgaggaagcaaaagggaatgttgggaaggcctacagggcaagaaaataaggatggctttttggtgccagctagcaataaactgaagctctcagtttgacagtctacaaggaactaaatgctgccaataaccccacaagattagaagcagatccttttccagacaggcctcagataagactctagtgttggccaacactttggttgcagacttgtaataggagctcttgatttggaaaatccagtgacgttctaccctaactgctgacccacagtacctgtgtgttagtaagctgttaagtttgtggcatcactgctttgcagcaagaaataattaattcaagtacctaacatacatgaagtgctgatacagtgttagctattattattacatgtggcaagacaataagctttgaaatcacaaaaatttgaatgtaaatataaactgtccattactactgttaagtttgtaaagacactttcagagttcaaattccttcatctgaaaaataggggcaatgatatctacccaatacattctttatgagggatgataataataaaataaacttgataaaatgataactaatatttattgagtatataccatgtaattttcctatattatcctatttaatttaatattattaaatgatcttatgtgccatagacatttacaaataagaaactatagtacagaaaaattaagtagcttcaatcaagtggctgttgatgaatatagtcagggtctaaacattggtagccagactttagaatctgaaccatacagtgatcctctgccagataaaataattatttcaacagatgtaattttgatcactaactatgttctacttttttattttaggttaagtgatataacagaatgaaacagacatttagacgttaggtgaggcaaaactaccaaaaggaatgggaaatagctgccagataagtagcattaaaaccaattaggtatgatattccgtaagcctagagaaattttggttaacattttatatgttcatgataggaaatcttagatgagaactggacattatgcaattgaccattgcataataaaggggtcttgttgagagcagatttgcccttgttgacagcagatttggtaggatggtgtgggtaaaagtctaattgaaactagtttagacaaagtcagtgaagaggatagcacaaataacacttcaaatgaacttgtatataaaaggagcagtcgttggaagggaaaaatagtcataagagcaatatttttgtttgatttaaaatgggagggatataaacatgtttacatactcaattagtcagtgttctctagagaaacagaatagggtacatacctagacatataaaaaagggatttattatgggaattgcctgatgcaattatggaggctgagaagtctcacagtctgccgtctcaagctggagaagcaggaaagctgatggtgtaatttaggctgattctgaaggcttgagaaccagaggagccaacactgtatctctcagcgccatagcaaaaatgtgtgctatggttgaaggttatgtcccctcaaataatcatgttgaaacttcatacctaatgtaacagcattaagagaaggggtcttcaggaggtggttaggccataggggctccacccttatgaatgagattagccatgttggaaaaggctggagggaactaattaggaccatttctgcccttctgctctcctaccacatgagggtacagcaagaaggccttctgcagacactaaatgccagggccttgatcttggacctcccagactctagaaccgtaaaggatatatatttgttattttttatgaattatccattctaaggtatttggttagagctgcagaaacggatgatgacaggcaaagaatcaagggacccgctgatgcaataaatattggagtctgaatgactgagaaccaggagctctgatacccaaaggccggagaggatgcatgtcccatctccagagagagagcaattttcacttcctccacctttttgttttgtctgggccctcaatgaattgggtgatacctgcctacattggcgagggtggtctcctttacttggtctgctgattcaaatgttaatctcttctgaaaacatcctcatggacacacccagaaatcatgttgtatcagctatctgggtatccttcaacccagtcaggttgatacacaataactatcacatacagtaaataaataatccagtagagaggaaataaccttcagaaaagatgtgggcaaattgctatagagtactgtctttgaataggtgaaagtagatgggttctaacgtatgagtgaagagctggctttgagtagagagaaacttacagttcatggaccataacattggaaagggtcagattgtataagtagactatgctaggtgcatagaaaggtaggttatagcttagaaacttctgatgatttgcaagtcaaattagaagcatgactgaagatggagagaaggaaggggagattataagagagagtagggggtatgaaattatcatttggagagcaaattgactaagtcatatgatttccaggcaagattaaggagacacttcagattattaatcatgaattcaaagtgccaaaagtcagtatgtctctgttttttgtttgtttgtttgtttgtttgttgtttgcttgtttttgagacagaatctcgctctgtcacccaggctggagtgcactggcgcaatcttggctcactgtgcaagctctgcctcctgagttcacgccattctcctgcctcagcctctcgagtagctgggactacaggcacccgccaccacgcccagctaattttttgtagttttagaagagacggggtttcaccgtgttagccaggatggtctcgatctcctgacctcgtgatctgcccgcctcggcctcccaaagtgatgggattacaggcgtgagccaccgcgttcggccttctgtgtttttactctaactgtatacagctctgcagatgtggtatgtattaggagggggattatatttaatcttgtctgggatttttctaggtaagtacaataaaaggaaattgacaccaagaagttgatagtttatataataatagttgaccatagaatttaaggtggagaagaagttattgaatatatggcaaggatgaaggactgtgaaaaggtggtgacatcagtggaatttaggtccaaaagattgttagagtgtgagccttagtaagtagaacatggaaaaataagaagtattggtctgtgagagggttgtacaaaactgaagtaatgcagatgttgcaattattgctgatagcatgttctttgtagggtcattcaaatggaagtttggggtacagtgggaaaaatactaagagtgcagttgcctcacctcctaggccagagagttgcaaaggccacctgtgtggctatttatattacgaagaattatgtcaaagtattttaggaatgagtgagagtgagacaagaagtaaaaccctcgggaaatgaggaaagacgtggaagtccataagtgtttgtaacaccgagtaattgtacgtgcattagaaaaatggtttcttaaagtgtgactttcaatggttgttgctagaaatgcaaattgccaagcaaatttcttgttagaaatgcaaatttgatcaacaattctggttagggctcagcaatctctcttttaacaagtcttccagatgattgtgacatattctaaaattgaaaacaactgaatatagtaatataatataatggcatgagatctaaaacttggatggaatataatggcatgagatctaaatgccatttagatggcattaatatataataaatggcatgagatctaaaactgaagattataatataagggcatgagatctaaaactggggattttagggacaattaggacgaatggtctggaagttacaaggaaaagcaaagttgaatccaccctacttttgggtctggtgaacaaagaggtgggacataccttctttatcattttttggttattagcttactaaccactgactatatactagaaaatatgatagctttacatggatgatctaatttaatcaaatagctctctttggtaagtactattgcaatctacatcttacaaaggaggaaactgacataaaattatgttaaatgacttgctcaagctcatatagctaatacatctttattcctcctcacttttatatattttataatccaatcgaatatttatttcaacaatcctccacctctggttttagtaacactcatatattttactaccatttcagaccgacactgactggtttgtatgttcctcatgaagtcaggtggtcaatgttagaactgccctaattcatcctgtctgatacttccaaagactcattagaatagtagatttgaaagggctcttctaacttgcctgctctaacttttctcttttatgtaatgctcagaaagttagtacttgacagacaaaatgtcagcagcagagttttatgaaaatctctgacccccattaaaactattttttattatacaccccatttcttcagttgaagcatatttagactagacactcatgctatgatttatttcttctcgctcagacttgctgttaatcaatggctaaaaatgtaattcccagaaatgtgccacccccaaattccttcctacgcacaggtgccagagtcatccatccaaaatgtgcaactgatcatgttacttctctgattaaaagtcctttaaaatctcctattgcttacagctgcgtggtgctttttcttttagttttaacacagaggaaagtgacagagtgctatgtaatctctgaaaataaactctctctctctttctcccttcttccctctccttttctctttccctcttttctcccccttcctttctttctcagatctcagccagatttcactttccagcctctcttgcaattagagatggccaactgactggattttaaccatagaaagccaaataattcaagggtgtcacttccagtccatacttgttaaggaagcagatatgtcattttacccactctctctacttttgttagcttgaaatgatcacctagaagactctggaaacagtgttgaaggctgtagttcttgagtgactcagtagagtagagtgctttcccacccctgactcctgcaggcactaatcagaaacaccatttttgatatttatgtgaatgaaaaataaacgtattatttgaacacgtggatatttcaatgtttacattttatagccactggtgctactttaacttacactgtgccctaatttttgactccatgatgttctatgcacattacacattttggattcaaattacctgtttataaatctgtttcagccataagactgtgagatcttgattaaagggatgatgtctagatttgtctgtaagtatccactgatcaatacagcataattgtggcacaatatctaaggttgaacctacatgctaacatgttttgcctgcttgtttcaaatggatcagtgaaaacaatcagactgcacagtttaaaaatgttttgacttgtgaaatggaaattacttatacatctatgaagaagataacgtctaaaaattcatataaagcttttgaaaatattactagaatataactgcctatttgtgaagcaccattgctttaaaagctattggaaattatatgttttattttgttgtcttaaaggaggcttaggatgattcggaaggttatacttatatttttaagacgcaattatgttatccacttctcttggtttcttttggtggttaacagcatatctatcgagatgaattaaacgacgtagcaattagtatactgtaagatgtcatttgctaaatgggtgagcaatcgcgtggacaaacattttacactgaaataatgatttacttacagaaatcaatagctatgtcttttttggctctaagtggtttatggaacataacctcaacaaattgtagaaatagaatcaccacagtgcattatgcctttctttaataaaagcaatacacagctggtgagactaaggttttgttgaatgatatttatatagaaattttcagtataataaatttgagaattaagatgaaatagaaatgaatctttttataatttgttgatatactgatgtttattaattggacattatcaaaaatcataactaacaatagtaaatatccttcatgtaacagattaagtgagacacttattgctatttaatagaatccaggaaccagaggccaggtattttgattttcatcatagtgaccccaatactagtagttttcagtggatataacaccgctggtagggaatagctggcacatgcatacaatttttctagttgtcacaagattggagaatacttctgtcctttactgtgccagggataagaaagatagaaggcctgccagacaggcttgactttcattctactcacgttcaaatggtgactggacattcagataaatgaaacacatgtttataattatctgtcttagaatatatttaaaacaaatatcaacataaactattttttgaagtttcaagttgtaaagaattttcctcaaattaaaattcacttttaaccgagggatgactcaaaattttatcaagaatattttaccatcctggaaactcttatcctaaatagcaatatgcttctcttggcattggagccacctttcttatataatttcttctttgtattacaattatagcattatgttgatttttcaaatgtgtgttaagtttcatatataattttaattcaggatagtagagggagcatgattaatatttaaataagggttttctatatttatggtaaaatctatactctgaaaatactatataatgacgtgctactaagcacctcttcccaactccacatttagtgacatcccatcataacttgaaattggatatggtgggtgtatttacactatgggatttgcagatgtacaaatcattgctcaacctctcccatctttcagtaatcaccagtacaccactctcagaaacatagtcctgtccattatagaaaaccaggatctataaaccccgtatattgtgctagtcattaactagcagtaaataaagttacctgtaagttaaaagaggtaatgagcataatatcatacaaaacactcttattattaactatacaaaatggatttcttttttatgttttccccattcagacagatatagaagtccaaaggtttcacttacttattgggtgtattttgcaacaaatttttccaggaatcattaagacacaacattgcataatattaaacttccgtagaagaattacagatcttttccacccatatgctattgcaagcaagtgataatgacatgcattttgaaatcatcaagctgaaatgatcctgaccatgctgtacggtttataattttagatatctaggtaatcaatctttcatgtgctagactagatccacgttttttatgagaaaaaataaaaggcttgttctgtctgaaggcacttcttcatccaaacccatacagctttggggttagtgctccttggactcaattctgagtgagatgtttcccatcactcatacattatggtctcactcaacagctaagagtaccttagctccaggttatcattagagaatactattaaaaactgtcttcggcgggtcccggtggctcacgcctgtaatcccaacactttaggaggccgaggcgggcggatcacgaggtcacgagatcaagaccatcctggctaacacggtgaaaccccttctctactaaaaatacaaaaaattagccgggcgtggtggcgggcgcctgtagtcccagctactcgcgaggctgaggcaggagaatggcgtgaacccgggaggcggagcttgcagtgagccgagatcgcaccaccgcactccagcctgggcgacagagtgagagtctcaaaaaacaacaacaacaacgacaaaaactgtcttctatctagattcttaaaagcattaatagaaatgtagatacggtgttaacagataaatttttgaagtagtatacccttttatctaaagagaactggtttttcacaccaaaaaacaatttcctaaaataatatgatacaaaacagtattacagttgatacggtttagctatgtccccacccaagtctcatattgaattgttgcttccataatcctcatgtgtagggtgagggacccagtaggaggtaatggagtcatggggcaggtatttcccatgctgttcttgaaatagtggttttataaatgggagtttccctgcccacacgctcttgcctgccgccatgcaaaacatgcctttgctcctcatttgccttccaccaagattgtgagtcaattaaatctctttcctttataaattacccagtcttaggtatgtctttattagcagtgtgagcacagactaataaaatagtatatttttaagtcctcaaaaatcatattaaaaataatataaaatatattcctgatttgcacaccaacagtttttatgatattactcaatatgctcctcattgtaaacatatgagatataatgcggtaatattatttgagatctttgtaatgggttcattacttgctttccttaaggtatctgcactcctttctttttactgactataaaatgattgtttccatttctctttggcttttagaaagctaagattcaaactgaaggttaactgaatcaattatgtaatctttattctcataattatgtctttacctaatccttaacttcatatacatacatatatatatttctttgcactgacgttttcttgctattcataaccctttttcctccttttttttcagttactgctcttgattttagtgtactaaaaatcacgtgcaacatgacagcctacaaataggtaaagtatagatacaattatataaagctttattttcatactcctacattttacaccacaatgaagtaaaacaaaacaaaaaaaattaaggaaaataaaaattcagtgatcattttagtacttattttatttcaccattgttagatctcactatatcttgctggttcagaatatcatagagatggataaagagtggtagcataattaacaacagtctttattttcaccttgccaaatggctttgaatgaaaaaaaaatgagtagatgtacacaaaataactactaacatatatatacatatatatatatatatatatgatttcatgattagaaaatatggctctctgaagtacatttcataggttaaaaaagcatgcaaaaatgcttttcattctcaacttgcaatatctaaacaataaacttacatggggaaaatgtgttgcccttgacaattatgcaggtacattctgaattcatgctacaaacttcaagaagcggctggtcttttctatttttttttttctatcatctaagatatcctttgagaatattcacttaggtgttttccagccagacagttaatgtcattgctgttattcctttgtttagcagaagcaagactttatttatggccctaactattgctactctagagtagagcagttgtgctgtgatatattagggcagtttgtcatttctatataaaaatattccttttatatgataacactttgatcaaaatactgggcttcagccacagtaggaaaataagaagcagcaattaaagttgctcaggtgaagaaagaatccagtgtatgctatattaatagttcatcagtgtaacacaatgtagtgtaacaaatgcatctgataatgtaatttcttttcaaaagagtttaaaaagattgattcaccaacattcatcttacagtcaagactgaagaatttgatttgttgttgcctattctctttattctgatagtttgttgtatctctctttataaaaatgtcacattaatactatttctaccttagatagctcatcatctcaattctattattttcatatgactagggttatagaacagctgccacttggctgagtgttgtcaggctcagaaagtgatattttcttttggaggaacactatttgtaaatccactcaacactcccgaaaatctttatttggtgttagtaaattgttgccctgatggtgccatgtttacaaaggaagtttctaattgatgtgacgttttcttcaacaaagatttaataacttttgctatattggtaaattgcttgatttattttaccacttaaatagtaaaagctttgatttagaaaatgcctgtgtgttatattgtggtacaaaggatagggaacttattgaggctctccagatctaaaaaatacacaatgtttaattttaaacaagcttccattattttcttgtaaccacaatttcactttggcagtttgatgaggccattggaagtcataatttatttatttcaaagaataaaaactgttttagccagaaaatacatttttttcagtaacagctttaaaatacattcattaaaacaactaatattaaattgtgttggcatatcatcatgaacaaggacaaaataattaaatattagaaattttgctgaaaaataaaatgctattaatttcattcaatcattacgcatatattaaccaccttctacaagtcagatactattctgagcattgagaaaacactcgatattcaaaataatattggtgtttctatagctagcttgtattttgttgtgtgagacaaattaaaaaaggaaattgtatataatgtttcaggtggtgaaaagtgttcttaattaaaataaatgagataaggacctaaagagtgacaattttgatgggtcagaaagaagaagttctagtttaaacaatgtagtaagagaggatccttctgaaagagaaatttgagcagaaaattgaaggaggttgagaaataaagcacaaataccagagagcaaaatctttcttgtaaagacaatagcaagtgcaaaaacaaagcaggagtgaacttagaggggcatcaagatggttgaagcatggtgggaaagtgaggaggctttaggacacaggttcaactccaagtgaaatgtgaagttgttgagggtacagttctaatttttttttgaaaatggcactaatgtataaactatttcagacaaaatatatttcaaggtgtaagctatatgtctcagctcattaaattgctaatatgacatttaaaaagtcatcaaaacacattaaattgccttgacaaatggtacttagaagcttttttaatgtgacatctgagttgaacataaaggtcacatcgaacacactaaaatgcataaaaacaatgggcagtgtttctaaaacatcattatgttcacactcatatgtgggagctaagctatgaggatgcaaaggcataagaatgatacactggaatttggagactcagggaaaagggtgtggggtggtgaggaataaaaggctacacattgggtataacatgctgcttgggtgttggttaaaccaaaatttccaaaatcaccactaaagaccttattcatgtaaccaaacaccacccgttccccaaaatcctactgaaatgaaaaattaattaattaattaaaatttcagcttttattttagatacatggagtacgtgtttgttatttacccccactttttaatcgatatatcaaagttgtacatatttatggggtgcatgtgatattttcatgcatatatagaatgtttaatgatcaaattagggtaaatgggatatctttcacctgaaaaatttatcttttctttattttgggaccattacaattcttgtcttctagctttcttgaaatatactatatatcattagtaaatataattttcttactgtactatcaatattagaacttattgctggtatttaactgtatttttgtacccattaaccaacttctcttaatttcaccctatcctcttccccttcaaccctctctggtgatcgccattccactctgcttccatgaggtccattttattagctcccaaataggagtgaggacatgcagtattgctgtgcttatttaacctaacataatgaccttcagttttatccacactgctgcaattgacaggattttattctttttacagctgaatagtattctattttgtatatttactacattttctttacacatttatttgctattggacacctcagttgataccaaaccttggctattgtgaatacagttgcatatatcttttctaaaagctgttttcctttattctggatacataccccaaagtgagattgtttaatcattggtagttgtatttttagtatttttgagattctccatactactgctttccaatgtggctatgccaatttacattcccaccaacacggtacaagggtacctctttcttcacatacatcctttctagcattttttttgtctttttgataatagttaccctaacctgatgagataatatttcattatggattggatttccatttccctgatggttagtgatgttgataatttttctttcacatgatgttggttatttccatgtcttcttttaagaagagtcttttcagatcctttactcattttaaaaatttgattatttgggtttactcttttttggctattgaattgcttgagtttcttgtatattctggttgttaatcccttgtcagatgcatagtatacaaatattttctattattctgtaaattttctctgcactgtgttgtttcctttgctgtgtagaagctttttagcatgatgtaataccatgtgtctattttttgcttttgttgcctgtgcttttgagttcttgcccaagcatctttgctcagattgatgtcttgcagcattttccagtgttttcttctattattttcatagttgcaggtcttacatttaagtcttcaatccattttgaggtgatttttgcatatggtgaaatacggggatctagtttctttcttctgtatatgagtaaaagatttcccaggatcattatttctattgtgaataatgccgcaatgaatggtgcatgcatgtgtcttcatggtaggtagaacaacatacattcctttgattgctgggtcaatagtaattctgttttaagttatttgaggaattgccacactgctttacacgatacctgaactaatttacattcccttcagcagtatgtaagcattctcttttctccacaatctcaccagcatctgttattttttgacttttttgtaatagccattctgactggtgtgacatggtatctcattgtggttttaatttgcatttatctaatgattagtgatgtcgactatttttttcatatggttgttggccacgtgtatgtcttcttttgaaaagtgtctggtcttgtcctttgcccatttttttttaatggcattgtttttcacttgtaaatttgcttaagttccttataaattctggatagtagacatttgtcatatgcataatttgaaaatattttctcctattttataagttgcctgtttgtcatgttgatagtttcttttgctgtgtaaaagctgtttagtttaattaggtcctatttgtcaatttttgttttggttgtccttgctttttgtgtctttgtcataaaatctttggctgtgcctatgtcgtgaacggtattgcctcggttgtcttccagggtttttatagtatagtattatataatactatcaaatactcttgctttctactttggaaattgttgaataaatggtttgaaattaaagaggattgtaatttgagtttattttaatttactttgaaaatatatttagaaatatcacgtctattattttttaaatatattctattattgtcaacacattagcaaatgcattattattataatctatattccagagtaatgcaataaataaggaataaattttatagtaaataggaaaaagcaaaaggaaaaatgtttctaaaggtttaataaaaataaatgctagaatttaagaaaaatagctatgtttggaaactattgatccatgctttcagaattaatttaggttgctgatttattttttaggtcaacaaacattttttgaccatgttttatatattagaccctgaagatacaataccacgcatgtgcactactttcaagaagtttgtaatacaaggacaaaaatctatgcataccatatagtgattcatggaattggaggaataagtcaaagcctctaatactgagcagatgttaagaagagtaggttattgctgtatgagggcattattttgaacttccagtaataaattggagtgaaaattatagtttggcctgcatataatataaggaggtgatttaactattagggagttttatttataattatcctgattacccagtgagttataaaacatcaggatttttttctaaatatatatttaatctattagattacgttgacacatgaatagtacttctctatgagtttaaaaatatgcaaaaagttaaacacagatgtggataagagtagaataaaagtggatgattggtggattatgtcatccctgaaaattgaatactaaggatcttttgtaactttaaaaaatattttccctctttaaatagaagaatcttccatgtgagctcaattccataatttataaatgagataatttgcaaaatttcagtactttttagtggtaaatgtttcacatttgttctaaaacattgttttacttccatattaagtgagttaccggccacttgtggtggtccatgcctgtaatcccagcactttcggaggccaaggtgagcggatcgcgaaatcaagagattgacaccatcctggccaacatggtgaaaccccgtctctattaataatacaaaaattagctggaagtggtggcgcaccggtagtcccagctactcgggaggctgaggcaggagaatcacttgaatgcaagaggcagaggttgcagtgagctgagattgtgccactgcactccagactggtgacagagtgagactccatctcaaaaaaaaaaaaaaaagtgacatacaaacatattttcaataacattatcataatgcttattgaatgaacacacagataacttgagtcaagagattttaatctactcttgtttcctcatgactgggttttcactgctgtttgagactgagcccactccttcaactatcctcttcattaactttatcttagaagtctttctttcctgctccccacttgagatttgagacacacctacgacatccaatttgctgggctccttctcagcattaatcccttctgaatgtagttatataattcagttagttttctttcatcatgtctttgcaatcatactgacaaagagttactaaaagtaaaactaatattgcccattatctgtcttgacatccaatttccttaaagatatttctttaagaaaacaccatattcttttattccaaaggaggatttgtatttgtttttgaatatagcagtttgtaaatattacaaattaaactaaaatgtagattaactatccattgtaaaaaatatttgagctttatcagagctgataaaaagaggttaaaatgttgaaaaagatcataaattcaatggcattttgttgtgttttagaatagaaaactcacttaaattgttaaaagaagacttgctaatttatcttttccccattaggttcagtgcattttggtagatgaagtttagaaagaggaagggagctcagacttaatagttggagccaactaatatactgccattctagtctttatgttaagatactagggacagagtgttcaatctgtgtgttattattagtagtattggcaatgagaatatgtaaagcaataattctcagctgtgggaaggcaggcacagcagccttcagagctacctcatatatggttctcacattcccctaaattaccttaacccataaatcacttttattcatcactgtttcctgtgattcactgggaaaagcctcgaagagcatcctgttactgaggtgaagacaaagcctgggctgtcccaggcagttcctctctaactcaagatgtcacatttcttaggaggcataggaataagaccttggtactttcaggcagttccaccccctctcagaatattgcactcccagcacattctacagttattcttagaagtataatcataaaatcataaataattggatggattcaaggccacctaaagaattgtcctccagtagagagtagaataatagcttccagaaactgttagggaagagggtatgtaaggaaaggggagatactagtcagagggtacaaagtattagttagactgacaagaggaaaaagttctagtgatctactgtacagcatggtaattatatttaataataataatatagtatatactttaaaattactaaaaaagtaggttttttgggaggtgatcagacccaacaccaggtcgtgggggtgacgaagtctggcggagtcaaaggaatgagaaaaagacaatttgagagagaaagtgggaccagggggccattgcgagtgtggaggctgcaaaggccccgagctctggaagcccacgctatttattggtgatcaaacaaagaacaggtggtgaggatgtgggggttgaaaggaaatggagtatcaagtgaatgagaaacatatggctacttgagataatgggagtgctagaagcaaggaaccagtaagtctagcagacatgcaagccctgcctcagcttctctcccaacactcaacttttctcccaacaattttaaatgttttaccaacaaataaataatgatgatgaatattgtaattaaccagatttaagcattccacaatatatacatgtgttataacatcacattaaaatatttacaattattatttgtcaattaaaaataaaattaaaaaagaaaatatggtaatatggtagaaatgaaataataaaccagactgacatgatatctctctttaagtaactaattattttctgtagaaatatatatacaaagacttaattacatttgtgataaacacaatgagattatacagtacaatagggagggattatattcttgggagttagagagacttctccaagaaggtgatttattagttgagataagaaaaacaagtaggtattagacataaagaacaggaggtgagaaaaattaagttaaaaaaaggaaagctggttgtttcgtggatgaaaggatgaaaggagtttagtatatttttaaaactgagagaaaatgggatagctttattgtaaagatcttgaagacaggggttcactacagcttgaagaggtgatcagaggaaaattcatacaacagtgcttcactacagctttaagaggtgatcagaggcaaattcctacaagactttattctcaaatcaattgaatgtcattattcttttgggtatatacccaataatgggattgctgtacctgggcaatgaaatatgtacaccaaactaacatggcatacaattacctatggaatcaacctgaacgtgtaccccgaaactaaaataaaaatttttataaaagttgagtgtcattaaggagtttttttgtttgtttttgtttttgttttttaaatcaggtttgtgatctgatcaaaatcctattgaagacatctttgactgctgtgggcattagggagtggcaagagtggaagcagatagacttgcactactgcatggccccttgtagcaatcagccagaaatcagaagctcctctatgtgttcattcatgaagggcttaaatggaaagaagtacaggtttacacaatcattgctggaacaaagaggagcaaagtcatcactcatgttttcagtctgcaacaacaacatggttgctctcgtggttctcagaaattattgtaaaccttaaatttcagagctcccaaatatctcaatctagagcatcaatatgaatgctcttgtcaagtctaatatgaagtcatagtgaaccccacttctgcaactgcttccaaatgatgatgacctctatttctcttcttacttctaaatcttctctctcttctgacttctaaatcttttgtgaatgcctcccataaactgactttatctagaactacataagaaaggactctgagaaatgaagttttcagctttacccatgaaagtcagatgatatctcaggggagaggtagaggcaatgatgaattgacaacagacaatataagaaaacccacccatttatcagttgagggttcatacacatcccttttgccaatttaaaattctcgagtaacagcagtgataaaatcattcctgtctcttttacgggatgtgatcccttttctgtaataaaattatgatcattctctccttccaaaaaggaaatgtattgctctgtatatcgtaatacacatcttggagtgacattcactccttttctagtgacgtctcaaggcttttttgatacaatgtaacataaatactaaattatgtgatatcttattttggattctctctaaaagcagaggttaagacaaagatttgactgtaagtaatttgcttgggacatgctctaaggaaataagataaggcttctaggaaaatgagaccgaggagaagaaaaacaaaacgtgtgtcactgagctagaagctactgtggaaaatgggagtcactctcaatggacactctcattgccagtgtagatttcattaaagtctttctgtcatggataaaagaatagcatattttcccactaactcctgttctccaattattgagaataaatttccctctctgaaaggcaataacttccttgtatttcccaacagtcccgtttgtgggccaggtgacttcagaaaaaaaaaagtctttaaacacaacagtgaagagaatgggcagaaacttgaggtgaggtgctttagcctgcactggaactcactaacacagcagaggggattagagacctgggcagagagtatattgttaaggcactaaagattctgccatacaccacatggaccactcacagccattcatatctcacactacatcatttctatcaccagcttcctcttccagtcaagatagagtaacagagaccatatttctgattctacttgaaacgaaccaagaaaaaaatggacagaatatgaagcaacagcaggcaatgaagggcagtgatccatgggagtgagatgaggtgagacctatgattgctacagtttactggctgcagaaaatttccaggatatgggacaggaaggagcagaacccaggcacaatcctgaacactctgtgaactaagtagatcaagctgtgaacctgggtaagtcaaggcagctaactagcattcacaaggagggatactagagaggagagatttctacagaaaacagactccagagatctgttgagtctcactcaattattcagttgagggcttcttagcacatgtgtgtagggaaactagctgaaattagggaattcggtgttgatataatggggataatcatcataagtctttaagggtatcactgatctctgaattcttctgtgggtgcagtaatgcttctgatttactcttccatctggagaatgaaatgtcaggcactgcttcacttatctcttctggacataactgtcacaagttagggttccttgtgagagtttagccaattgctaagtagactgataccagttacacatctaagaataaggtaaatagccagagggtaggaccactggcccattaaacccattgtgagatatactagaactaggaatctgtttatcacctgacctccttaaatcctaaatcaaacaggtcgggagcaaggagtggtatgataacattttggagaccttggtatctgtgtccatacatcaaaaaaagtaggtattattctttttttaatggacagtagtcaggtagacgtcaagtcacaattttctagaacacattagaggaatatttattgtacaagagtttcttgaaataataatcctttgcaagtgatacatggtagggatcatgatttttctattgaagcagcaataacagatactgagtttcttttgcttgtgtaagttaaacaataacgtgtcatatcaacatctatcttacccctcagagcactgtagtgtattagtaatcactacagatcattgtggagcatggcaccttggttgctaccccggcattgtttctctttggaatattactctaactcttctccgataggtaagtgtagacacgtggtttctgccattgtggaatcctgtcatcctcattgaaatgtgggaccaagaccacagcaagtttttctacagttactactgaccatatgatgccaatgccctctccactggtgcaatatttattgcttttgtgtaagcatgtattctgggccatactgaagaacattgtcagatgatgagattttcagtctgttataaaaaatctattcttttaagtttttttccttagttttcttacctttcacccaaactctgacaagtctgaaatttctataatttcatttacaaaaggccaattttgtctctaggcatcatttgactgtcctaaagtatattaggattagttccaggtgtcattgtctgatgttaaaacttgacttacaggaaagtgatcaaacatccataaactcaatgttattcaggcatatatttcacctcctcccggtccaacaatgttaaggtcaaccctcaaaatcatttctcttgtttctgctggtacataactgtcagatcctgtaatattttcctgtgaataagctacttaacctcacagcagggaacatatttttctatttgtgcttgctgagatctaaacccagctatttgtcagaggacaatggttagtgcaggtgtgaatacagaacatggtgagtatactttgtataagatatgcatcagggaagtgtgtctaaggccctccaggcaagaggaggcttctgtctttcagcaatgaggtctgtgttgcttgtaccagcactaagagtttcagggaatctgtggattcaaatgactcacacgcagtgatccaagtctgtcccccattccctaccaggccctagtttcattttagaagatctgtcaaatctctattttttaaaaatttatgattctttatcattgtggttaaatctgcagcctgatttgtagtactctgctctatggctgccaaagttgaatgtctcattaaactctgccacagaggccttctggcttccaagacgtgtcttgagttgctatttggcccacagaaacctttttatttaaggcttccaaggcacacagaagccagtcaaccactaaatcttcgtaattactattgcctgcattctgttcaagtgctgaaagtacagcataacacaatcattgctcttctacctgtgcctcatcccagtccttcaaaaattatagtattgggttcattatgctatggtaggtcctgggttaataccaccctactttccctcagcaataagatttgttgccaactgacaggtaaatatcacatactgcgggtctctggggccactctgctataattggctttgcttagtaacttctggaaaacaaaatctgtcaattgcttctgtagaatctttgttccaacaagtgacttcttgaaatagaagtctaaaggttaattggtgacagaagggtgtgtgatagccttaagagctcaacattttgttgtctttcaaacatatctcttttcctttcctctttctctcaactgttatcaacctgtttaccttccttaattgcataatcatatagtcatcttatttgcattatttttcctttcacatatgtttcatagctcatttatacaaagtgtatatgtttttttcagaataaatgccatattctggagaagaaggtttatgaactattttctcactaatatatagtaaaattatagatcatgatacatgtaacaaagcacaattacaataaataacaactatgtacatatttactctttgtccatgaaattcttgattcagactcatcagattcatcattgaattgcatgtaagataaacatacttttatatacttatatagtacatgcttatgtacttatatttcaggttgtaatgaatgaaagtatatttctttttatatatttgtatgtggcttactttttaataaaatgtaaagatccacaatggttttctccttttttttttttttgagacttgagtctcactttgttgccgaggatggagtgcaatggcacgatcacaactcactgcaatctccgccttccaggttcaaacaattctcttgcctcagcctcccgagtagctgggactatggtgcacgcaaccacgcccggctaatttttgtgtttttagtagagatgggatttctccttgctggccaggctgattactcaagtcatctgcccacctcgacctcccaaagtgctaggataacaggtgtgaacaatcgcccccggcttagttttctactttttatacatttaatacaaaatagctgtattccattacctatgaatatttcgaataattaaagacatatttctatttttaaaaagtccacttttactctacaacaagaaagatgtaccatatcaagaaattttcatttatcaatagcaaataccgtgaatacttatgagaaacattgaatgagatgatatataacctgctaaaattcatcactcacgtgcttgtgaatatcacataaatacgaatctgttaagcttactagtgtgttgtattctacaactgataatctataagaaaacaaatttttatgattaaatacatgtattatgttttgatatatatttatggatatctaaactgaaaataatgtgtaatagcttttcctaaaattgttctgatatctaatgcatctagatgcatactgaattaaattaacaaataaatctaacttaaagatgagctattacatcagtctgtgaaaatccaagtcttttaaaaaggaaattagacagtgtcatagaaacctcttttctcagctttgtgtttccagtacatgtttaatttagcacatactaattagacatgagattataggtgttccattctcttggaataacatcagagtcaatccagtccctaggatctgagtcctcacaaatacactgtctgcagtctcccttgatcagaagagaccattcagcttgcccttgtctgatctggcatttttgtagggacactttctctcatagactctgctgtatttgttagaagcatagtgagggagtgtatgatgtctcaaaagtcatcagatatcattagaggttccaacaagttataattgactttgtgtttaaagaagagaacaacagggtcaccaataacacattctgggaaggcagccagggcactaccatgggagtcatgatgcctaaacgtaaattgagtaggctggacttgcagtgtatactgatcagaagtgacacagtgattaacgtgacaagggagaaaggaatttctaataaggtgagcagatgtcttggaaagaccggaacgttagccttcagtttaatggttacagcatgtatgctttcaaatagacaagaccctcttctagaatcagcccctaatatatgccaagagctagtttaagcccgagggtcaataaggcggctgtgttccctctggtcagcatgaaattgggtggatagtgagagttaaagaccattacatataaaagtcttattgtttagtctaatcttttttaagttttagggactaaatctttaaacagtctcccgcaaacagaggatgttttatttcatttaaaccttaaatagatacaaattatattttaagaagggaatgacttttttttttgttttttttttttttgcaaaattctaaccaaacagtttgagctcccttttctcattttttttttccacaggactactctgggcaatagtgcaacaagtgttattttcatcttttccaagcaggcagaatagagtcagttgttgcttgctacttgaaaaaaacagacaagtcaatgtttaaacaaccttacgttttttcccttatttttgtactttttgaatagttgttttccttctctctatttccccagtgcttcttttatcgaatctctgtgcttggctctttggctactgttccactctctcctgggctctcagtgactaagctgctgtattattgtcatataggataggacaggctctttgtaatgcatacattccttttcttcattttaaccagatgaccacactggacagctatatttaaagccaaaaaaaccctcgatttcagaataattgtcatgaatattttgcattgtcattgaaaaagatgtatttactcagaagctggtgtcagaaattcaaggagagttttgcacagttctgcattagaggaaagacctcttctttaacctggagttactaagctacccccaaatggtaacaaactcatctggaatattcctgcctcaactttaaaacatttttttaaatggaaagtctcaaatatatgcaaaagtagaaaaaatttccatgaaccccagtgtacctgccatgcaagcatcgctaatcctcaggacaaggttaatcttatttcctctctgccaccatcccctcctcctccatggtactattttgaaattcctgatattaaatcagactttccataaacattttgacagaatatcttctttcaatatcaagacaacaaatgctatttaaccacagattaccatcacacttcctactattttatgaaataattaatttcagttacctaaaaatacaaaagaaagacctcctcctaaattaataacatgcatgtcatataaaatagccatattatgcacttgttaaatgactgacttgtccataaaaggcagtcactatcatttaatgctcagttccttccctgcctgaacttttacataccttctgatgctcacagcaggacacactatgtaattcatatcaacatttggggcatcattcaacgaagacaggaattttaacattatacagcaaactatctcctattttgactgaacacagaatctgtaattcaaatgacaggaaaataaacagagtttacagccaagtttacataaagtaattgtagaaaactcaaacacaccctatcaaaaagtgaagtcaatgttactgtgaattttcccccctctggaaaactataatatcattgtgtttattctacttatgacaaattgctcacacgaattttcattagagggttcaaatttgttttactctctggaacattagcttgaaatcagaattaaaaatatacaaagattcttatatgcaaatataacactattatgaagaaacaaaataaatgatgtcttaaaaaatgctaataaaaacataatgaagaaaaagcctatcatagatacagtagtgtgactgagacatgccctgcattctcttgttttctcatataaaaatcagagattatcagaaaatgaaaaagatcccattttctttgtgaaggagtagagtcagttctttctggaacagtatataatatgacacaaacgcaaacataattacaagattacattttacattgattgttttaatattgatcatgttgaatatatagtttctagattattttttaaatatattaaaatccttaaaggaaaaaaaaactcattgaatttctgctcattcagtttctgactacttatactgcggtttctggggtttctaacattccctgaaggtactgcatctgaagagttcacaggatgcagaaaaagcatgaaccatggcagaggaccctggcgtgaggaatgcaaagcacactcagggggttaactcagcagctctcacaatggcggaagaagtcgattagcaacaaatttcatgtgtttttcctcatgtactcttagtgaggttaaagactcctttttagtagtgacattctctactaaggagtgacgaattgtgtgggttttcatacaagtctttcttaaacaaaataacttagctttcagagagcactgtaattttccttttgctttgtctcgttttgttttattttcattaaatgtgttggagcacaaaatgcagaaggctaataataaaagaaatatgagataaaggttctatatgacagagatgtgtaattttgagatttaattacaatgtagtataaattggatctatctgctataaaaaaaggacagaaaagaaaacaataacaacaacaaagctataaaagaaagatgataatactgaataattgaagaaatttggacataggctttaaattaggtaagagttctgaaacagctttaaatttatatgatgattttgttgtggttatataggataatttattttcttccttatgagaacactctaaagactttagggttaaagtgtaacaatatccacaacttacactgatatggtaagtcataaaataaagtacgtatatgcaaaagagagacatatatgtagcagactgatgcaaatattcttgcaaattttctataagtttgtagttcttaaaatatagaaaaaattaaaactggcaacaaaaaattagtgaatattaattaagataaataaaattatttaatgccataaattcattccatttaataatacacatgaaaaagaatgaggaacatattacagtataaaaagacacacacatacatacatgcacataaagggataaaccttacaaaaaataaaattgatcaagaaaagctatgcactaaatagcactgactatatgatttcaattgcatacatttctaaaatatacacaactgttgtgttaggacatgtcaatgtactggtaactttaagatacaaaaatgtagaagtagacaaactacccatctgtttatgaaaattgaagaatattactttagcattgaaactaattatgttgtgtgtaaaagcaaataatagagactttaattaagaaaaacatcagggactttgcagaatgaataaaataaggaatatataaaatgatcttatacagcgaaccttagtatttgtgagcatatgagtgaaatattagataattctcaaatgaattgtgggaaggcaggtgcttaaatttggagaagatgctgtattagtccattcttacattgctgcaaagaactacctgagactgggtaatttataaagaaaaagggtttaattgattcactgttcctcaggctgtacagctggcatggctggggacacctcaggaaacttaacaatcatgatgggagatgaagggtatccaagcaagccttcacatggtggcaggagagagagagcattgggggaagtgctacaaacttttaaacaaaaacaaccagatctactgagaactcactatcatgagggcagcaaggggaaaatctgcccccgtgatccaatagcttcccaacaggctctttctccaacactgaagatcataagacaacgggagacttgggtagggacacagagccaaatcatatcagatgcctagaagaataaataaagagaagaaatataatccatagagctacaccactaacatttgtatcatacttacacatcttctccccagtattgttttccaatatgcttcagccttcaactctttaaatgtcataaaatgtttgctagggagcctctcttgtccaacacatgcgtattagttcattttcacactgctgataaagacatacccaagactgggagaaaaagaggttcaattggacttaaagttccacttagctggggaggcctcagaatcatggtgggaggcaaaaggtacttctgatatggtggcggcaagagaatatgaggaagaagcaaaagtggaaacccctgataaacccatcagatctcatgagacttactcactatcaggagaatagcacgggaaagcccttgtgattcaattacctcccactgggtccctctcacaatgcacgggaattctgggagatataactcaagttgagatttgggtgaggacacagccaaaccatatcaacatggtaattacttctttgttctttaaatgtctgtcaatgctcttttaaggagtagttaaagggattaggtgggggaagagaaaagaatgtttatgaatgctttaacatgatttatcaatatgaaatggtaacaaaccgtgcaattctgctaggctattatgacattttatttcaatttcatgcaagttagaaaaaagttatattaccattataaaaatggtgaccactcatattctgagaaaattaattaactaaacattaatgccaagtttaaattgcaatgtctaacttctctatat[450 bp omitted]gtagtaagacatgaaatttagcacaaaaagtgggccatttaaacaactactcagaatggctttgtattaaaaagttggtgcaaaagtgatccaaaatgataaatggaggagtgttcttagtgatagaacacagatgttgacttagaggtgaagtgtcttgatcaaagaagctctattttgaataacaaaatacttatttgttttaaacagagatgagttagggaatccatggcaatattttaacttcttgctttaccattaatttcatcgtatatattctcaaaaagactctttcctgaaatataatataataatcaacaaaataataataataaatggaaagtaagaaaactaagtcttgtgaaattataagttaattgtaacataatttaaccaagattaagtaccatgtcatagatgtggggttaactgaaactgcagtgtgtgatgtgttaatacagctctagaaaaaaagggaaaaaatccacagatacaggtttctttaaaaaatttgatttatactccttcaatttattgataatgcctataatcaaacctctctatagccccctgccaaaaataaaaattttaaaaaagaggaaaaaagtatagttaaaatcagcatcaaagaaaattattcaacttgccattattaaatatttagaaaagaatattctagaaccctaaccatttcccagttccaaagccactttcacatttttttggcatttgttacttcagcaagcctacttctgagtaccaattttggtcttagtccactcagcttgctaaagcaaaataccatagactagttggcttataaataaaagaaatttatttttctcagttctagagcctggaaagtccaaaattatggtctggcaaattttatatctgatgaggcctgtttcccagctcaaaaagaaccatcttttactcagaaggtacaaaggatacaaaggacacaaggctcccaaaggagcttcctggggcctcttatataagggcactaatctcattcacgagagccctgccatcatgacctaatcaactccagaagtcaccgcttccaaataccatcacctcggggatcagatttcaacatatgaattttgggagggggacataaacattcatactataggaagcattgaaatgcaatttccctaaaatatggatttcctgaaattattagaatgcacaagaatgtgtacaactgaaatcattgtaagggaatttttcagcctattttcagatattctggtatgttattcttttatttacaatgttctttctattatacaatattcctatttgttactaaagtactatataatttgaaaaaagtattcaaacatgcatgcacattttagtgttctctatttgtaatgttctctattattttttacttatttatttatttatctattgacacagggtctcactctgtcacacaggctggaagtgcagtggtgcgatctcagcccaccgcaacctctgcctcccggtctcaagcgaccctcccatctcagcctcctgagtagtgggatcataggtacacaccaccgtgctttgctatattttgtagagatgaggtttcaccatgttgcccaggctggtcttgaactcctggactcaagcaatctggtgccttgcctcccaaagtactgggattacaagtgtgagccaccaaatctagactgttttctgtttattttgaagaaatctgcattaactgcctttttaaatgatacattttgaatgttattgactaactctatagaagttgctcatatagtaaggactttaaagtaagtatcaaattatttggcaaaagaatatagtagcatgattaaagtggaaaacaatgtggtcccatatacattcaaaaaaatagtaaaaaagtgaatttatacaggaacataaaacatattttcttattttctgtttttcattattttttgctatcaggtaaaaataaaccaggttgcttattttcatttttcattaattaaaacataagttaattaacgaatcgcaaaaaactcagtgtcagtgttgaataaatataagtaacgtgaaattcaattgaaagtagcctgatttccagataccaatttaagttagttatctatttatttatttttctgatgtgtgataatttatagagtcttctgttaattaaagagcgtaataccacatatgaaaattttttgtaccctttattgtgctctaacctataacgacatatttttgaagctagttgcatattgcatgtctaagaaaggccatgtaaagtccaatgagagagtactaattatttgagagagatgcatatattcaaaatgccttaaaaatgaaggtgcatttgttaagttcaattcatatttttttaaagactcgaaattgtgtatatattaaagcaggccaattaaatccattagtgacaaaatcactgattactgttaggtcagaaaagtagagcttgttgcaacgtgaaatattacagttatgttatagagctagataagtgaatccttagtatatctttttatttctaaaattgaactcttaaatattctgcgcttaatcatactaacagttcttgtaataaatcacatttagtgcaattggttcacgtttgttttgaatgtgttgttagtattacctagcattgagtgtgtttgcgtgtctgtggtctgtacgtgtatgtatgttggggaggattggacccctctccagagaagaaaattatcataattcttgattgaaaatacattctcctcagtctatgcataatctgcttttttgttagtcattttagtaacataataagaacctatagaatcaccacctgctcccccacccgccatcacacatagacagacacacacaagctaaggcattggggcctagggaatggagtggaaaggatggatattcccattccgtccatttcattccttgcttcctcactttactccatctttcataaaactattatctaaaaggcaacgctaataattatctttactttgtttttttgaaaatataatttatagcattaacatatatagttaagtacatttttcttattgaaattattttagctttctaaacaatagatgattttatacacacgttatgatgaaatttaaacattactttgctataatttatttatcttaagtaacatataatgtagtatggcaggaatataacatactttaaacaaactacagtttaaacatctacagtcctcttaagagtaactgtgtttttttcactgtttagcaattctgaacatttctctcttaagcgttcttataactgtttcttatgaatgagaaccaatttcctttggagatatatttaagatttctttagagacatgctgaatctcttgttttatgtgaatttcctattttataagttagtgccaatttgtttctataatcaatgtgtaaaataggtggatacatgatagaaagatagattagatatagatagatagataatagagagacagagagatagacagatagatgatagatagataaaatagagtggccatatcatttattgcctaaactgatatagttttgtgagtgaaaagggctctgttattaaatgttttagcaaaacaactacaaacttgaaattttctaaaatcgaacaaagtctcaaaaaacccacaacaaaacaaacaaacaacaaaactgggtctgtggctaagttgattttggaattgtctttaccacatttagataatgcacttgaatataaactttcatagtatgtaaatgttttctaaattggagaatgacgataattcaaatttcattggaggaaattgagattaaattatataaaagaacactaaatcatttattcatttattcattcaatatcatttgataggaattaagcactagtttgaatttttttttttttttttttttttgagacacagtctcgctctgtcgcccagaccggaatgcagtggcacgatctcggctcactgcaacctctgcctcccgggttcaagcgattctcctgcctcggcctcctgagtagctgggattacaagcgcctgccaccacgcccagctaatttttataactttggtagagacggggtgtcaccatattggccaggctggtctcgaactcctgaccttaggtgatccgcctgccttggtctcccaaagtactgggattacaggcgtgagccaccgtgcccagcatagtttgaccattttttaactcattcattcttgcaattattttctttaaaagaagattccaaaacagtgtttttaataaacgaaaaatatgaaatataaatgaaaaattttatgcttattcatagctattggtagatctcaggataatcaaaggaagaaaattttcaattctttttaatcatttctaaattcgtattgggttaaattcttatctgaattgaaacgttaatgtcatttttaataaggctgttcatgtagttatcttttgtactttcttctagagatcataaagaactcttagcttttaattcttagtgttggattttcagaaccatgtccttgggggaaagacatttgtattaatctacagcctctgtcacaagtaatttaatggcgatgtcagtgtacttccagttattcttagccaaataactacaacaaaaaaaatcacactatgaactgtacaggaaaggcaataaaattattagttaggactacaaagagaaaaatatagcacttcataatttttacaaatgtgaatatatgcttttgtatgtaaggtcttaaaagtctatggaaagaaaaataggtagactgctagttgcaaggctagtgtgaattccacaatgctatattttcttcaaatgcccttgttctatcaacctggtttagtccacgtctatctctgtctatcatagagacatatctttataacttttataattgtcaaaataacaggcaatatatgaagtatttaaatctaaaaaagcaaattggtcaagctctgagtccaaatcctacctttgccactttcaaacaatgtgagttgagctagtcacatgaactctctatgactcagtttctgtgtattactatgatatcaaaggtgattataataattcctaccccacatggtttgggagtatagcataaattattttatgtaaatacactagtgtaatagtaaatttggctatatatgaataaccggtaaatagtattcataatgtgttaaattttattttaagcatattcaatgatttatttaatattcacagttgcacaggcatttatgaggaataaagaaggtaagtaggtcaggcgcggtggctcatgcctgtaatccagcactttgggaggccaaggccagtagatcatgaggtcaggagttcgagaccagcttaccaacatggtgaaaacccatctctactaaaaatacaaaaattagctgggcatagtggcgtgtgcctgcaatcctagctactcagggggctgaggcaggagaattgcttgaacctgggaggtggaagttgcagtgagccaagatggcgccactgtactccagcctaggcaacagagggagactctgtctcaaaaaaaaaaaagaaaaaaaagaaggtaagtaacgtttgtaagatcacacaactgggtagatctgagtttcaaacagggagttggccttaaaggtcagtacttttaaacattgctctacacagaactatagttaaataagttctgatgccagtttccacatctttctcattaaagtaataatggtaatattaaataagtaactttgtactctttagctaagttggtttatatcatagctatgacttggcttggggccccatttgctctcaactgtcatcaagtatttccagtctccacagtatggtaattattctttagaactatggtgataagtcttcctcagagcttctgcacggcaaaggaagctatcatcagagtgaacaggcaacctacagtatgggagaaagtttttacaatcgatccatttcacaaagggctaatatccagaatctacaaagaacctaaacaaatttacaaggaaaacaacaaacaaccccatcaaaaagtgggcaaaggatatgaccagacacttctcaaaagaagacatttatgcagccaacagacatatgaaaaaatgcttatcatcactggttgttagagaaatgcaaatcaaaaccaccatgagataccgtctcatgccagttagaatggcaatcattaaaaagtcaggaaacaacagatactagagaggatgtggagaaataggaacacttttacactgttggtgggactgtaaactagttcaaccattgtggaagtcagtgtggcgattcctcaggaatctagaactagaaataccatttgacccagcaatcccattacccaaaggattataaagcattccactataaagacacatgcacatgtatgtatattgtggcactattcacaacagcaaagacttggaaacaacccaaatgttcatcaataatagactggataaagaaaatatggcacatatactgcatgcaatactatgcagccataaaaaaggatgagttcatgtcctttgcagggacatggatgaagctggaaaccatcattctcagcaaactatcgcaagaacagaaaaccaaacacagcgtgttctcactcataagtggaagtggaacaatgagaacacatggacatagggaggggaacgtcacacaccagggcctgtttgggggtggggttgtaggggaggaataacataaggagaaatacccaatgtaggtgacaggttgatgggtgcagcgaaccatcatggcacatgtatacctatgtaacaaatctgcacgttctgcacatgtaccccagaacttaaagtataataagtaaataaataaataaaataaaataatgtaaacatgttttgtaaagcagaaatatttcctgaaatctggttgccatttttatagtgttatgcaaattcctgtttactttttaatttgttttacattttttacacattaaaaaattattgatacataataattgtacattttcatggggttcatgtgatgttttgatatgtgcaatgtgtgatgactaaattagggtattttgtacatccatcccatcaaaaatttatttctttatgttggaaacatttgaaatcttctagctattttgaaatatacaattcatttttgttctctatagtcactctgctgtgttactaaacacagaacatgttccttctagctaactatatgtttgtactcattaaccaaactgttttcatccctctcaaccaaacttcccagcctctagtaactatcattctactctatatacctccatgagatcaacttttttatctcccacatatgagtgagaacatgagatgatacttgtctttctgtatctgccttacttcacctaacagtaaactctagtttcatccatgttcctacaaatgacaggattttattctttcctatggccgaatagtatttcatcatgtttatataccatattttctttatccatttatccactgatggacacttaggttgatgccatatctttactgctgtgaacagtgctgcaatgaatacaggggtgcaggtatctctctgatatcctgagaccaatgaaacagaatagagaacccagaaataggcccaaatacttatagccaattgatctttgacaaagcaaacacaagcaaagtggagaaaggacaccctatttaacgaatggtgctgggataattggcaaaccacatgaaggtgaatgaaactggatcatttctcaccttgcgcaaaaaccaactgaagatggatgagggacttaaatctaagacctgaaactaaaaaattctggaagataatgtcagaaaaacccttcaagacattggcttaggcaaagacttcatgatgaagaacctaacagcaaatgcaacaaaaacaaagataaataggtgagacttaaactgacgacttgcacagcaaaaggaacagtcagcagagtaaacagacaacccacagagtgggagaaaatcccacagtctatacatctgacaaaaaactataatatccagaatctataagaaactcaaacaaattagcaagaaaaaaaatcgcatcaaaaagtggactaaaggacatgaatagataattctcaaaacaagatatacaagtggccaaaaaacatatgaaacaatgctcaacatcactaattattagggaaatgcaaaatacattttaattttcggtaaaaagtttcgctttgtttttttggattctcttttcctttgaaaaccccttatttttgttggtatttcaattttacataaacaattacatgtaactaatatgcattttttacatttcctaatgaatcatatatatttgaatctgttaagattttatatttcaaatattagttacactattttgagtgacagatgttcaaattgataaaatgtaacaattatgaaaatattttatgtttaatctcctctttgtaatttatacaacattagaattatttgtaaagacaaaattgaaaagtaaagaatctcagaggccaggcgcggtggctcaagcctgtaatcccagcagtttgggatgccgaggcgggcggatcacgaggtcaggagatcgagaccatcatggctaacatagtgaaaccccgtctctattaaaaatacaaaaaaattagccgggcgtagtggcgggcggctgtagtcccagctactcaggaggctgaggcaggagaatggcgtgaacccaagaggcagagcttgcagtgagccgagattgcgccactgcactccagcctgggtgacagagcaagaatctgtctcaaaaaaaaaaaaaaaaaaaaaaaaaaaaaaagaatctcagaatcctgtttttgcaagttccaaatatagttttttaaagtactattttttatcacttggacttatactaagttgggaaattaaagaagcttaggatgtatttagcacgggcattattcctttttagtagcattaaactgtgtttttctctttgcatctggttcattagttattcttttcacaactctgacaattgcacttatagaacttaaaagcatcttctgcgatcacctaatcaaacactcagagaaacttccttgtaactcttctgcgatgtgagcctctttctttctttctttcttctttttttttttttttttgagatggagtctctttcttaagggggaaaatgtatcagttaattctgtttttaaaggcatttactgctagagtacttttcttccatagccaattttcctctactcttctgtgataacacgctttccacatttcatttcaccggtagaactagaaaatacctgagaagaatgatgctaccactaagtaactctatatgtataaggaaaaagctacaatgatatccagatctttctcttttgaagactaactagtaccaatgtttttcctagcagaacctttataaactttgatgctcactagcgacatgttccaaagcctatctggaaattgtaataacaaaatgtactacacctttgagaaattttttgaagtttttttgtttttttaaaaaaactatatatatatatatatatatatatatatatatatatgcactttttggcatttcactttacaaaaaaaagccaggccttagcacacggaagcaacacagcaaatgaaagccacaaaccacactccttaagcctgtattatctctcggaatgaaattaaaggttagaaataaagtttgacattagcagcccctctggtggtcttcatcagcggcagacatttcctttaggcctcaaacatacattgggtttaaatttaaaatgtatttttccatattggccctaaaaccagtgctcagattagtgtggcctgctcagcatgtcgctatatctcactgtgactgaccgtacgtacctcatgctgtgtggctgcctgattctttttcccaaaactcctcagctgtctcagctagacttgatctctgccctagctagactcagaatgtttacctgatactttccttctattatggtacttgagatcttgatcttaagtgaccaaagatctggcagaatagaataatagatgtagaaagacacaaaataactctatgtaaaataactgtgttctaaatgaattagaaataccatgagataagcaaaatggcaaccaaatgccagggctctggggacctgccatgcaatccatctttatgatcaacaacaatttccccagaattagaaagccatctcattgacagtttatttcgccttaaagttatttattcatatgtaaggattcattggtaccttagaatacactggtacttttcttaccaagcttattaccctgactaatctcagtagcactaacctgatgccactcatacattagactgaattcatgtattgaagagtcaggggttatataagtaccagatacaaaggcaaagcaaggctgtcaatgattacataaataagttagatgaaaagatacatgtaagtgaaaacagaccctgaaattgcaaaaccttctttgtcatgaaacaaacaactatccacattctcctgagttctgatcagaatcagtgggtaaaattagtaagttgaactagagtctgcaacagataacttgccctgaaaagcaaaatatgggatcttagggcaataactcatgttaaactctcctctctgataatacattttatttcttagcctagatttttaagaattatattaaataattcttagattttaaccaaaaataaaatattgtctatggttttaagaatactttatccataaacatctatatgtgtatatgtgtgtgtgtgtgtgtgtgtgtgtaggatacagttgcttatataggatagattgatatagaaagataaaggtaggttgctagacaattaaaaactgatggataggccgggtgcggtggctcacacctgtaatccgagcactttgggaagccaaggcaggctgatcacaaagtcaggagattgagaccatcctggctaacacggtgaaaccccatctctactaaatatacaaaaaaaattaaccgggtgtggtggcgggcgcctatagtcccagctacttgggaggctgaggcaggagaatggcatgaacctgggaggtggatcttgcagtgagccaagatcgcgccactgcactccagtctgggtgacacagcaagactctgtctcaaaaacaaacaagcaaacaaacaaacaaacaaaaatggatggatagatgacaatgtacgttagatcccatatactgtaagtgaatatatggttattaacaacatggtctcataagaaagggaatagacaatctattgtaatattcatcctatttgcataggagaatcacaaaatccagctcaaaaaaacatttagaaggaggaattaaaaatgtccacttatgattaggttatagaagatcatagaaaaccattcatagaaacaataagaaatcatataatttttaaaaattatatttttctttaaaatcattataaggagctgtggacacaaacaaatgtcaacatgggagaagcccttcataagtgaacaagagacaggagacactttcatatatgggactaatcgctaaggttgaaaaaaatagcatatggaaaaatagcaattttttaatcaactctggactagcatgttagagttaaatctgaaagaacaccaaacacaaagttatttctcttgcacaagtaatctctttcatgataactttctgagtaagtagaggttaaggttagaaataaaaaatggaaagagatcttgtgttcttgtagtttagtgtaatcagagattcacaatgttgatatctcatggtatcacagtctctcaatcttatcattttgcagccaactgttctatcatatgtcctacaatctaacaaccttaatgtttagaagactcacattctcagtgtgacagcctcagagctttgtggattccaaactgaccaaaagaacaactcacagatataaagaaataagcaaaatcaatttatgataaataaaaacgttaaataaagaataaatgcaaaaataatgcatgatcaagaaaaaagttgtgaatacaaaattttttattcaagacaatttcttagtgaacaaatattaagtaaaaaaaattcagatgtaaagctgcaacaatttgtttccagcatatccacataagacaggctaaggaaagttatccaggtaaggaaatgttataccagacggtataggataaaataaataccaggccgaataaaagtgtgggaatacataaacattcattttaccatgcatctatctacctttattttatttaaggaattattggtagtttaaagcaagataaaaacagtatgttatttggtttataacatgtagaatcagaatatataacagtagaagcatgaaaagcaagcactacactcactggtttatgaagtagcataatgctctttgagagtgtacattgatttgttaaaggtgaatattgtaatctcaagagaatctacaagattttaatgcagatgaaaatgtcctattctggaaaataaaaaagctacaaagaatattcattaacaagaaagagaagcatacaccaggacttaaggcagcaaggaataggctaactctaatgttttgtgcaaaagcagtttgggtttataaacagggctgcccttatctttaaagcttctatcctcaaatctttaataaaatattaattccagctgccaatcttttagttgtacaacaaggacttgacaaaaatatattttttttctgtattgaccccatagatactttgtccctgaagccaggaagtaccttgttagtaaagcaccaccttttaaagtttttttgatagttgacaatgctcttggccacctagaactccatgagttcaacagtgaagatgtcatcatagtctacgtgtccgcaaacacacagtctgtgtctaattcagcctctagattagagggtcataaggaacttttgggttcattacacgtggtactctgtggaaagaattgccagtgctatagaagagaactctgatagaacattacgaaagtctggaaagattaccgcattgaaaatgccattgttacagaaaaagccatgaaagccatcaagccagatacaatacattcctgcttgagaaaactgtgtccagagagccaatcaaggaaatcatatagttgtggctgtagcaaaaaaaaaggtaggaggtaaagggtttcaagatatagatcttggagaaactcaagaactaataaacaccacaccagaggaattaacaaaagatgacttgatgtagataattggttccaaaccagtgcctcaagatgaagaagaaaatgtagaagaagcagtgccaaaaagcaggttgattttagacaatctgagagaaagattctaattattcacgacttcatttgacttcttttatgacataggccatgctatgacacaggtgctgaaactaaaaaaataaaaataaaaaatgatggcacgatttgtgccatatggaaaaaattttagagaaatgaaaagtaactcagaaattacaatgcatttctggaaagttacactgagtgtgcctgcttcttctgcttttgctttcaccttcttcacctcttcagcctctgtcacctctgacacagcaggaccagcccctccttttcttcctccttctcagcctacctaacaagaagatgacaaaagtgaagacctttacaatcatttattcacatttaatgaatattaaatatattttatctttcttatgattttcttaatagcatcttcttttctgtagcttactttattgtaaaaatgcaatgtataatacataaagcatacgaaatgtgttaattggctgtttatctgtaaagcttctggtcaacagtaggctatttgtggttaagattttagggcggcaaaagttatacaagagtgttcaatagtgcagggcatcagggtccataaactccacattgttcccgggccaactgtgcttgcaaagtctccatacatttttcattgtttcaaagaatactaagaaaaggaaataggaagatgcaatggaatagtataggaaagtgaaaacatgagaagtttgttgggtgaagaatgcagaagggccacttcaggcaaagtaaaacatgtgtggaaaagtacaataataaaataaattatgtaactagcagccagagagtaatttactaggaccatattgtggtagtgatgaagtgttgggtaaagcagaaaatgaaaactgagaacttagttgggatcaaattgtgataaagcttttatgccatgctaagttatttgcaattcaatctaagaacaatagtaaattaaagaagacaggtaattattattgtggcatatccagggtttgtttacagaatgattccaatagggatgtgtgggggaagtatgatagataataaggtctatgagtaaaataaatgtaatattgattgttaacagtacagcataaaattctaatcgggatggtgaaaaatgtacttagtacggaagagttagagaagaaagtgtgtatttggaagaaaatctacagaaatttaagactgattacacagagaaatgatgaaaataaaaaaaaatcaatgatgtctacaaggcctccagtttgaaggtaatggattataccatagatgtgtcactgaattcaagataaaagcaagatctatgcaggagacatgaagattttagttcaggccatatttgatttgtgttacgtgtgacatgacaatgtaataatgtctgatgttttaatatatctgtttggatattagaaggcctaaaatttgggtataatcagcaaagctacgtaactatattgggaagcatgataatgactaagatcacagaaaaaatgatatttttcagcaaaaagaggagagaatttacaaaatattttcaaatatttcaatcatagtataactttaagcaaatcagtcatcataatatatcttaagacttgcaaacaatgctcattctcaccacaccttcatttaggttagtatttctaaatgttttcagtcataaatatacttaagagcaatatctgagcacaggtaatcaagagataattatttttctatttttatatccataaatgaaatattcatgcatattttagataaaaattacttgaaaagccttgggaatagttttctgctctctcttttgtaattaaatatgcaaaacttgtttctcttggtctctagaattctttactctttgccattttgtgacattttgaaaatagtataccaaataaaaaggcatgatccgccctttagaaaacaatggcacaaaatgcatatattttcagggctgaacaaatgacttgaaatggataaaatctgttctaacagaaaccaatatttcataagtcacaaaacacactaatctatttgcttttgaaatggttcatttttactgtttttaaataaatgctatttttccttgggcatggtaactttgaaatgcaaaattcttatgagttaaccgctctctgtttcaaagactcagagcacatgacaagcctctccaatagaaaataaattttaactgatgttttgctttatgatttaaaggacattaataagccaatgctcattcagaaaacatagaaattcacaaagggcttatttgtatttagagtaacaattgggtttattttaacattatttctcctctacataatgtagctctaatgtaagtattcctttggcttacaaactgcaacgtaactgattattgtattaggataagatgtgacaacgtatgtgaaatactcagatatacaagttatttttattattgtctcagcttccacattttggaaggcagtcagcctggctagtgtcaataccagttacagtgatatttgatgtaatctcttaccttcccaactgtaatgttcagaccataatccaatttattttgtgatgttgctataatagtaaattgtagttttagatacaaaactatttagaatgtattccattcttaacacacactatatatatattttttatttccaaatgccttgaagttattttgcatgtatctaggttctagagacaatgaaactaaatatttgtgaaacacctaattatttaatttaaaactgtgcattaatcatacgtggttatttaagccatattttacagttctaattaagggcagacttatgtagaattagtatattggtttctcacttcttgaggaaaaccatcactgtatatgattcataaggtattagctctttgtctctctttgattgcatcttgactacacaaacaactgtgacctcttcatatagtgtagatacctggcatgtaattcctgtataattctgttttctctgtgttacattgtaacatgtttgagtacattttttgccctcagttatataattcgaattatatataaaactttcctaaagatattccaaaattggaagactgagttatatctccaactttttcacaattacaaggttgtatattgttcaattggaccttaagtgaaatgctatgaatccatacttggtaaattgcttcattatttctatgttagccattcttgaataaatatgctaatattttgatggatttcactaaactggcataagtaattaattaacatcgtatagggttttttccatttacacaatgttttcaaatgaatgagtaaagactcaaaaatagttactaaatatgctatattccagatagtataaactaatttgactatcaatcttattgtacaggtaggttggtaaaacattattgttctacctaatggatggatcttgaaatattaaatagttggaatatttggataacaatttataaataaatgaaaagttcaagatatattatcctaactcaagtaattttcaaaaagtaatactgcaagaagtaatattctaattttaaaatattgcattctactgatttttaaaagcatacattttgtgaaagaagtgttcacttctaaatggaaatctaataatttaaaatgctatgtgagcactaccattgaatgttttcaacagtaaaaaccaagtagcttatcatgcttagcattcttaatttatgtttaatcaagaagacatgacctgtgattgcaatttttcacttgaatccagaaaacgattgagatatatgattccaaaaagtaacatttatcttatcaagagaatatatatgtatttattagcagaaagaaaaacatctccctcagcccacaaccctgtcaggattgttacatccataattttaactataagtttgactatttcttaatatttcattcagattaacacgtatctattttcttttggttttgagagataagaatgcaactgacttaaatcttcattgcttctctcctactccatccccaagtttgatatttacataattacatgtatttattctgttgcatgcctttattatttatataagaatagtatacaatatgtacttgtgaattttcaacaatgacctgttctaggaagggtaaagatattagttctcattctaatacaatcatacttcctccactctttgtgtatgttatgtttttatatttaatagctatattctgctctatctcaatagctgttttctgggtattggttatcgtttatacagttttgtatgtgtgtgtgtgtgtgtgtgtgtgtgtgtgtgtgtgtggaaacggagtctcgctgtgttgcccaggctgtagagcagtggtgtgatctcggcttactgcaacttccgcctcctgggtttaagttattctcctgcctcagcttcctgagtagcttgaattacaggtgcccgtcatcatgacccgctaatttttgtatttttagtattttgtatttttagtaggtggggtttcatcatgttggccaagctgatcttgaactcctgacctcaagtgatccgcctgcctcggcctcccaaagtgctggaattacaggcgtgagccaccacgttgaccaaaattttttaattaaaattaatttgcattatcatgactatatatataattcactacatagctaaaggtacattagtatagtattggatatcttagactactcaaaagagaatgttcttagccttacaaataatgccagatttcacattcaagtatttttgaaatagcattttttctgccactgtttttctgcttttttattctttgaaagaatattttgacttttttttgacctagtgttctaaaattttacaaaggaatgtctacatataggtctaaatgatttatacatttgagtgctcattggtcaatcttcaaatgtaggaggatttttaaaattatttatatatgatttctacttgtatattttcaattttgtaggacccatattatttaaatcattttctatggctatataatatacactttttaaaatggtttcttatatttgtttataatcatgggtctagttagtattctaaacatttcagcaattaaaacaaatttctccatgtgtatatatatgcacagatttgtagggtttcgtttaattactgtactgtttttcttcctgaatttgtgcaaatcatttcgtttgatttttgtcttactttatcaataaagcacagataaaataataatcattccataagtttcttggaagtcattagtaaattagtatatacaaaactctgaaagttttataatagaaatgaagtcaaatatttttgttgttactgtagttccaagattattaattatacaagttataattcttttttatttctattattattctttttccattctctgaagtttccatttccccaggagtcctagactcagttgctcattatcatgctctttcctactgattttacttacagttctcctcattcttagctctctatgtcttgaaaagttgttggagttattatttttggtaggtacatcttttagtctttatgcttgagtagttaacatattaaaattacagtgttataatattctgtgattctctatatacatattattactagtgagttttctacctttggatgatttttttattgctcattaatgtccttttctttctaattgaagatctcctttcagcacatattgtaggacaggtctggtgttgatgaaattcctcagcttctgtttgggaaagtctttatttctgctttatgtgtgaaggatatttttgatggagctactattctagggtaaagggatttttgttttcttcagaacttttaatatgccatgccaagctctcctgatctgtaagattcccctgtaaagtctgctgtagggcatattggcactcccttgtacgttgtttcttacctcttgctgcttttatgaccctttctttatccttgacctttgggagtttgattattaaatctcttgatatggtcttctttgggttaaatccacttggcattctataaccttcttgtgattgaatattgattttttttttaggtttgggaagatctctgttattattcccttgaataagctttctagtcctatctttttctctacctcctctttgaggccagtaactcatatttgcccttttgatgcaatttttttagatcctgtaagcatgattcattttttgtgcccttgactgtgtattttcaaataacctgtcttcaagctcactaattctttcttctgtttgatcaattctgctattaatagtctcatgcactcttcagtatattagttgcatttttcagctccagaatttctgcttcaatctttttaagtatttcaatctctttgtgaaattgatcttaattacttttctgtgttttctttaatttctctgagtttcctcaaaaaagctattttgactgttcgtctgaaaggtcatatttctctgtttcttcaggactggatcctggtgccttatttagttcatttggtgacgtcatgttttcctggatggtcttgatgtttgtagctcttcactgatgtctgggcattgaaaagttaggtatttattgtagccttgcagtctgggcttctttgtacctgtccttcttgggaagtctttccaggtattcaaagggacttggttgttacgatataagctatatctttttaagggcaccccaagtcttctgctgcagtttttgcagacttgtagaggtactgctgtggtggtcttggataagatctgaaataattatctggattataatgtacacattcttgttcttttctcttactttctcccaagcaaatggagtccctctctctctctctctctctctctttctctctctctctctctaatgagccatgtgcagctaggggtgtggtaacacaagcacccctgtggccaacaccacttggatggtgctgggtcagacttgaagcacagaactaggtctagctcaaagcctgctgtgcccacttcctgtctaccactaagattgttcaaagccctggggctctacaatcagcatgtggccaagccagccaggcttgtttcctttccttcagagcagttagtttccccaggccccaggcccaagcaggtccagagatgccatccaggagccagggaccaaagtccaaaacttggaaatctcctgagtgctctatattactgtgactaagctagcactcaaagcatgagataaagtcctttccactctgtgctgccatttctacaggcagaggagcctctccctgtggccaccactactaaaggcttatgtgtaccactgtcagactactactgatatttacttaaggcccaagcaatcttcaatctggttgtggaaaatgctgccaggcctgggtctcaccctgcaggacagtgggctccaaagttccctttacttttccctttgcttttctcaggcagaaggattctttcaccattgccaccagaactgggaatctgcttcatctcacctgaagctagtacatttcagagtctcacccaaaacccacaatgcacctcatggccactgccaggggatgtgggaagggtggtgtcaatgattctagagtgtctttcctgacctgctcagtgcctctttcaggcatataaaattaaaatgaagtattgtgattgctcacctgatttttggttcatctgatggttttgtgtgtgtgtgtgtaaatagttgttaaatttgctgattctttggggatgatagctagtgaagacttccatttgagcatcttgctctactctttctgatttgcattttatgtcacttgtatatggaagaatttctttttttattgacaaatgatcgttgtatttatggggtaaaaagtggtgttaaattttttaatacaatgtggaataattaaatcaagttaattaacatactctttacctcagatattaaaattttcattagaatatttaaaatttactttcttagtaaaatttaaatgtatactactcaactactaggataatcaacatgctgtatattgatctcagaaaagttaaaaatcagttattccagcatagttacatacttatataagaatatatgtttatttgcttttcttgacgttttcccaagtgcaattctgaaatgagaaatatttttaattacttaaaatatatgctgtcagtaataatgaggaatgtggtaatctgtgtaatttactaaattgttgctcatcccgtttattagaaaagcatttctattgaaataacaaacccttaagtcaaagcagtaaagaagaatttgaaaaaatagttaaattatgggttttttgcaatttaatggagtaattttggccatggaatccaataattaaaaaaaaaaaaaaaaaatggaggccgggcgtggtggttcacacctgtaatcccagcactttgagaggccgaggtgggcggatgagaaggtcaggagattgagaccatcctggctaacacggcgaaaccccatctctactaaaaatataaaaaattagccgggcgtggtggagggtgcctgtagtcccagctactggggaggctgaggcagtggtgtgatctgcaccactgcactccagcctgggcaacagagcgagactccgtctcaaaaaacaaaaaaaaaatggagtctgggtttttatatttatagatttttcctttctttttttttggagtttctcattttttattaaattgtactcaagtaatagcctctgtggaattgaaaattaaggatatttgctctccactacaaataatttggaaagcaatggtttagccagtattttcaataactgttaactgacagactagatcaagaccgcaaagttaacaagacgccaacatctcagcaaataggagaggtgtctagaaaacggcacaggttgccaaaatttaggactgctggtttaacttgattcatcctttaagttcctttcttcattttgtttgcagatagacttcgtgtttggctcacttttaatgagatcttctcattatctactatgcaagtatgtatgaggatattttttaaatacacttatatttataggtttcaaatatttccttttcttagtccttgtattagtccacttacatgctgctgataaatactacccaagactgggaagaaaaagaggtttaattggacatggctggggaggcctcagaatcgtggccggaggagaaaggcacttcttacatggcagcagcaagagaaaattaggaagaagcagaagtggaaacccctgataaacccatcagatctcctgagacttatgtactatcatgagaatagcacgggaaagactggccgcaatgattcaattacctccccctgggtccctcccacaacatgtaggaattctgggagacacaattcaatttgagatttcagtagggacacagccaaaccatattgttccaccctcgcctcctccaattctcatgtcctcatatttcaaaaccaattatgccttcccaacagtctcccaatgtcttaactcattttagcattaacccaaaagtccacaatccaaagtcttatttgagacaaggcaagtcccttctgcctatgagcctgtaaaatcaaaagcaagctagttactttctagataaaatgggggtacaggtattgggtaaatacagctattccaaatgggagaaattggccaaaacaaagggattacagggcccatgccattctgaaatccagcaaggcagtcaaattttaaagctccaaaattatctctttgtctccaggtctcacacacaagtgacactgatgcaagaggtgggttcccatggtcttgggcagctccatccctgtgactttccagggtacagcctcccccccggctgctttcatgggctggcattaagtgcctgtggcttttccaggcacatggtgcaagttgtgagtggatctaccattctgggctctggaggatggtggccctcttctcacagctccactaggcagtgccccagtaaggactctgtgtggaggctctgaccacacatttctattctgcactgtcctagcagaggttctccttgagggccctgcccctgcagcaaacttttgcctgggcatccaggcatttccatacatcttctgaaatgtagatggagattcccaaacctcaattattgacttctgtgcacctgcaggctcaacaccatgtgcaaggtgccaaggcttggggcttccaccctctgaagccacagcccaaactctgtgttggcccctttcagtgtggctggagcagctgagaaacagagcaccaagtccctaggctgcacacagcacagggaccctgggaccagcccacaaaaccactttttcctcctgggcctcagggcctgtgatgggagggtttgccatgaagatctctgacatggcctgaagacattttccccatggtcttggggattaacattaggctccctaggccgggtgcagtggctcatgcctgtaatcccagtactttgggaggccaaggtgggcggatcaggaggttgggagatccagaccatcctggctaatacggtgaaaccccgtctctactgaaaatacaaaaaattagctgggcatggcggcaggtgcctgtagtcccagctattctggaggcttaagcaggagactggtgtgaacccaggaggcggagcttgcagtgagctgagatcacgccactgcactccagcctgggcaacagagcgagactccatctcaaaaaaagacaaacaaaacaacacgacaacaaaaaattaggctacctgctacttatgcaaatgtctgcagtgggcttgattttctcctgcaagatgagtttttcttctatatagcagagtcaggctgcaaattttccaaacttttatgctctgcttcccttataaaactgaatgcctttagcagcacacaaatcacctcttgaaagctttggtgcttaggaatttcttctgccagatacactaaatcatctctctaaagatcaaagcttcacaaatctctagggcaggggcaaaatgccaccagtctgctaaaacataacaagagtcacctttgctctaattcccaacaaatttctcatctccatctgagaccacctcagcctggtttttatggtccatattgctatcagcattttgggcaaagccattcaacaagtctttaggtggttccaaattttcccacattttcttgtcgtcttctgagcccttcaaactgttccaatctctgcctcttacccagttccaaagtcacttccacattttcgggtatcttttcagcaacaccccacgatactggtaccaatttattgaattagtctgttttcacactgctgataaagacatacccgagactggaaagaaaaagaggtttaattgaacttactcttctacatgcctggggaggcctcagaatcatggcaggaggcgaaaggagcttcttacatggtggtggcaagagaaaaataagaagcaaaagcagaaacccctgataaactcatcagatctcctgggatttattcactatcatgagaatagcacaggaaagaccagcccccatgattcaattacatccccctgagtccctcctacaacgtgggaattctgggagatacaattaaagttgagatttgggtggggacacagtcaaaccatatcagtcttctacctatttcatgagaatagttgatacacaagtgacattattcagtctctatattataatattgcagaatttaacaccactgatattgatcctattcttattataattccacagttagttgcaatttctttgctcataccctaattagaagaaagtatactttcttcagtacctatcaatgcattacagaatggttcccatgcatgtcattcctgcggtcttcttggtgaaattccaactcagaaattacttgtttttttaaaaaatgtggataataaaaatgctctttaagatttaaatattgtattgatttctaatgctgaaccacttaaaataaaaaaaaattaattaagtgctgggattacaggcgtgagccacagcactcggccactatttattttttaagcaacttttatgtgatataaattgcttttatgcttctccaagactgaaatcctaaataaaataatatgttatggtctgtaatcccaacagtttgggaggccgaggctggcagatcacctgacctcaggagatcaagagcaacctgggcaacatggtaaaaccttgtctctacaaaaaattagacaggcatggtggcacacgcctgtagtcccagctactcggggaggctgaggcatgaaaattgcttgaacctgggaagtggaagttgcagtgagccaagattgcgcccctgcactccagccgggagagggagtgagactctgtctcaaaataaaacagaaaataaataaataataataataatgattacaactttagtggtgtacttattttgttcatattttattttaaatcacacattcaatacttgaaatggaaaaacgatctttgttttttgattcttttaaacttctgtataccatttttggtataagtatccttaaaaatcagagattttttctaatttttctaattaatctattgtgtcaacaatagataatttttacatgtttttaaagttcaaaataaggaatactctaaatttgtttatctattgtcattatttactgagttatatggtagcaatgaaaaaataattaaaaagtacaagaataagagtatctgaggaattccaccaaattgacaaaattttggaagtacaattttgggaaactataaattagtaaagtaaattcctttatatgtaatgtactgggaatccagccaaaatagcatttttatttttcttagtctacaaagaaccccttgctccaggaaagcagtagaggcaaaattggtggaaaaggaaggcaatgcaaggaaatctctttttttctctctaaaacgatgacatttctctgaagttttgacttacacatttttctatcttttaagtatcatggttatatgtataaagtttatattttgtactgaacattaagtcacagtagaaaatttacattaaacaacatttagactaactgcttatgttaaccctttactcgtttgcccagagaatactccccggcagcacttgcactctagataactttgccacgatatatcttgcttttattgttactttggcatcgctgtagtttattgactttggaaacaaaagacatcattctatttatagcattctgtttttagtagtggtatttcaatttacaaaatacagtaattctcaattgctgaaaatgtcaactcctagaaaacgtagctccttctcgtgctgttaacatcgttctcgaacagctgttcgcggaagattcatttgatgaatctgatttttccaaaatagatgattctcatgattcagatgattctgatgttagttctgattacgaataactccaagaacagtttttatattctatttcctcattgaaaatcagttagatttggtttagcttcaaagagcatgtttacgtaaaattaaatgagtactggcagtgagctgcacttttttatttctaaacaagaaaagggttaaatcttatataattcaagtttattggtagtatcaacagtactgatagtagtaattgtaatcataggatggtggcactaattacaaaaaggtattggtaataatagctaaggattattgagtgcttaccctgtgattagaatgatgctaagctctttgaatttataatcacttttttgcctatcacaataggtgagaggcattattatttaagtgagagccataatatattttatgggatgcatttagaatgaacaagaatgaagctggcaacaccaaagaagaggctctgcattgggtagatattgagggtttggttaaggctgaatgctaagaatatgttgagaaacagaaaggtcacgcagacgatgagtgataaagctcgttcgaatgcgggtctcatgatcacgggtcaacgtgcttaaccattcagcaccttttcattggttctaataagtggtagtatatgcagtagctaagattcttaattctggggtcagactttcttgctttaaagtttctttcgaccacagctgtctattcactaggctgatgttggataaattacttcattgatctatgcctttgttttcgcatatgtaaaatggagatgataatagggactccttactaagataggtgtaaagatgacatggatttatagctaccatatatttgaaaagtttcaaagagtgcctggcacatagtaagcactgcgtgtttgctatcatttcttaaggcccaattccctattgggaaggctgaaagctttgtaggtttatagtttatatgattctttgacacttttttagcagtttatttgttttattggttacatagttatatttatttagacatagctaactaatattataagacaccataattgcattttatccaggtagaagcaatagttatacaatcatttcttttaatgccatcagcaaataaaggtggaaggcaggtaaaatttttttaaatgctgtgtctagatatttctaacacgtttttctagccagatgtggatttgagattttaaaagcacatatactacttggtataggtgattctaaaaagagcagttgtcagtatttgtaacattatcaattgttaatgcgcaaaataaagtatccagaagacagaagaggagacggcatagacattctcttcgggcaacaggactagcaggtttactatgagttttacaacccaaagcgagtatgtttctaaaatcttgcatatggctttgcacatgagtaagtgaaaatgtgatgttataaggtgatagcagctttgcattcctgtccaaaataaacattttaagatacattgtgtagacgtgctccttggggaatggaattaaataattttctttagcagccaaccagtaaaactgagactctgttatcagaacagagagtatctactgcaaatttccagatactttcagtaaaatctatttatgatataaggcatttatagaattgatttagccattgatatgagctgaaaaatttatatgttgaagtcttaacaccagtacttcagaaagtgaccatgttttgagttagggtgtttacacaggtaataaaataaggcctttagagtgggccgtagtccagtatcactgatgttcttataaaaaagaggaaatttagacacagatgtacagaggaaagacagtgtgaagacacagaaagaagacagccacctacaagccaaggaatgaggtgaggctggacaaaatttttcctcacggtcctcagcaggaatcaactctgaaaataccttggtgtcttatttatgtgtgctcgtatcagaaaatacctgagactgtataatttataaacaacataaacacatttctcaccgttgtggaggctggaagtgttaagatcatagaactggcagtttcggtgcctggtgagggcctggtctttgctctaagatggcaccttgttgttgcatcctttggaggagagaaacaccatatcctcatatggcagaagggaaaaaagtggtgaacctactttctcaagcccttttatcagggccttactcctatttattagggccctgctctcatggcttcatcaccttctaaatgtcccacttcttaagtttcaacatataaattttaggagaaactttcagactacataatttcacttctggatccccaaactcatgtcctacttacatgcaaaaaacatatattttatcccagtacccctcaaaaatcttaacttgttacagcatcaactcaaaagtcttacatctagcatctctaaatcagatataggtgagacacaaggtacaaaataattctgaaacaaagtgctctccagttgtgagccagtacagtcaaacagttgtgtgctttcaaaatacaatggtgagacaagcacaggacagttagttccatttcaaagggaaaaacagaaagaaggaggatcggaattaagtacgaaatcacaaagtaaacaacattaaaccttgatgcttgagaattcttttctttgactccaggtcccaccttccagacacactagggtggggttgggtccacaagcttccagaagaccctagcctatggctttgcctggtgccacccatgatgcatctttcatgggctggcgttcagtacatgtaactctgttaggctagaattgcatgtggtggccctacagttctggggtcatgggggtggcactgctcctggagctcctctacacatagcccttgtggggcttctctgcagaatccctgaatttaaggctcagtggacttgaaccaggggctccaatgggtattgccttagtggaggcttttgtggcagccatactttgtggcagttctttgcctgggtccagagactcttcaaggcattctttgaagtctagatggagagagccatgtctccatagtttgtgcactccatacagctgcagagttagcaccacttgcattctgccaaggtttaccacatttgctttgcatagtgataggctgagctgcatttgggcctccttacactacactggggaggccaaagaacactgcacaggaatgcatgaagcgaaactcgacatggccctaggtaatgagctctgaggtaccatgagctccctagggctctgtcttgaaactgttctgcctgtcactcttgtcctgtgatggaagtggcagccttaagacatctaaaatgccttcagggccattattccactgtcttgatgaatataatctggcttccttctatccatactaatttcattatcaagagtaatttggggccgggcacggtggctcatgcctgtaatcccggcactttgggaggcctaggcaggcggatcacgagttcaggagatcgagaccatcctggctaatgcggtgaaaccccgtctctactaaaaatacaaaaaaaaattagccaggcgtggtggcaggtgtctgtagtcccagctactccggaggctgaggtaggagaatggcgtgaacccagaaggtggagcttgcagtgagccgagattatgccactgcattgcagcctgggtgacagagcaagactccatctcaaaaaaaaaaaaaagaaagaaaaaagagtaatttggccacactgttggtattctgtcatgaacgtgccctctttctttttacaaactgttcaggctgagaattttccacatctttacattccacttcccttttgattatacatttcatctttaatttgcttctttcttttaatattttactataagcaataaagagaagccatgaaggcccctgatccctctgttcagatatttcttctactaactatcctaattaattgcttccaaattctgccttccacaaagttttaggatgtggacacaattcagccaagttatttgccactttatagtaaagaaaggcctttattcagtttctaataccttgttcctcatttttttctatgacttcatcagaattgcctttgccattcacatttctaccaatattatgatcacaaccacttaggtaatctctgggatgactgagactctgtctagagctctatttttctgagcacacaataaaacaacccttaacatttcatttatagcaatctaggcttcctccagcactcaccttcaaattcttcaagcctctaccttttaaccagtcccaaaactgctttcatatttgtaatgtcaacatctcacatctggtaccaatgtatgtcttagtacatttgtatgagtataacaaaacaccttagacttggtgagctataaaaaatactgatgttggaatgacttttctgggcccagagcttgggaatgtgggctatggccttgcgtctgatttccattttttttttatgatgtctaagtaccattgaagatgccagcagtgcctattttcccgcaaatattattatcttgaacagattcaaactgaactttcccagggcactttattcctgtagggatggcccagatgcaagatactgtgagtaaacaagtgtagagtgtattttattcccttaaataattcatcaaattgaggtaataaataaataaataaataatcaaataaattataatacatcattataaatgcgataatacctagacagtgttatagtatcacgaagataggcggagggcgagaaattcaagcagaggagtgagaagtcattgcctacttctggttttgaagcagatgggccatttgctataattaaagtagagatgtgtaagaaactgcctgttcttcattgtctggcctcctggagagaacttttacctttgttccaatttaatttggactcgtcagagaagtcattatttccagacccaccaattgggtggtgctaaaagaacattacattcttattttatacatgatacaagtctctattgtacagtatgagtttttataaccttggatatgaatgactgattaattagatatcacaaattacatacttaaagctgctgttggtttgaatgactaacaaaaggaatctacaccttgcacgtcagaaaaatcagaataattcaaatatccatcattaaccctgtcattcttctttattcctttggccaatgtaggatgacctgcaacaaaaataaagtaagatcagggctagaggtgacagaggtttgtttgcagattgaagagaaatgaagaaagtgatgtttttattttttcagttttgacctagataatttggattttcttgtaataattgtaataatgaaatggttgttactgaagttatttaataaaattggttattgcatgtctgacccctcagttcctcattgaaacaaaagttttaagacctttctagatcatgtaagatttctcaagagtgcaagtatgacattatcaagggaaatgcattttatttctgaacacaactaaaaattcaggtagatataggtctgaaacttacatggtacctaacacatataattaattttgtaaatgactgactcatgaatactatgaaaattgtaattacaagataaaaatatcagatatgatattccatacatatacttatatcaccttgtatcaatcactaatatattttaactttggaagcattggctttagtaaggagatatgtgtgtgtagttataaacatatatttatatgcattttgatattatatttacatgcattttgatattaagcattattattttttgttctgggaaaagaaaaagtcctctatcatttattaattttaaaaattgagttttagtggcctgcataatcttacattagtacattgaatttgtaggtatacattcttgcaatatattcactatatattagaaaaatgtctatagacttcatgaaacacagctgtggtaaagtaggtcaaaattcttttcataacaaatctaatgtgtacttgaatataacatttattaagaaaattagaactctttcttataatccaggtcaatgccaagcttactttggaaatgtgaagtgaaacattaatttacttaaattatttatttgaaagcataaaatattttaagtactggtttggtaaactattcaaagaattgatgcgaaaaggtagtatttacttcatttataagataatttatctactctattttattaatagattttaaacttggccaaaaaaatggatagacatacattttgtaaagaagtgtgtttttaatttaccttctcatagcaatatagaataaacacaattatctaatgtgcttgagttttaaatattgaggccttatctgtctttttaaatgtaattatgtcaatatattttacattttttaagggttgtgttaaatattggtcaaaattgtagacactttaattttattgattgtagaaaaacaacacggaggagtttctgcactggaacacaagccttccgcctgccccacaggccacccagccaccagtatggttttttgtgctgtggtgagaggatggggtatgtgctacttatcctcattccacactatgtgattccaattttattctgggttctggtgcacaaaagggtgagtctacgaatagaccaactttgaaggacttacaaaggtagacatatattatctatacacatcaaattgttttataaaagtgcattgatcaaaattgtacctttatatataagaagaagcaatgtaaactgcctggttaaaaattattcactaaattttgggtatgcatattcactattgggatgaatatagaagtaaaataacaacaaaaacacatcaaactaaaaactttgcattgggtatacttttggtgccatttgcacatgctttctacttgccttagattggcttgatcacacttgctccctgagctttttgttcagtaaatagcattggctagctctaccattgcctggtgccctaagacaggcatgttattctctccagaggaaacacaggcaatatttgtgcttgcaaaagatagaagggcatctctttgccaattaaggcacggatttcaaaagtgagtcccatgagattgcacccacattgaatacttgcatttaagctttacctctatttttctagagtatccaggttataaaatgtctgcatctgaaaaagtcttatattatgctttttctataaaaaccccaacaagcttcagcttttgttatatagatacagaatataatttatatgaattaattttaataaaatatttatttcatttacatgttgtattagtcagggttctctagagggacagaactaataggatatatatacatatatatatatctgaacatgtatatgtataaagaagaatttattaagtattaacttacatgatcacaaggtcccacaataggctgtctacaagctgaggagcaaggagagccagtgcaagtcccaaaactgaagaacttggagtgcaatatttgagggcaggaagcatccagcatgggagaaagatgtaggctgaggggctagaccagtctctcctttttacgtttttctgcctgccttatattccctggcagctcattagatggtgccaaccagataaatggtagatctgccttctccagcccactgactcatccttcaatccaatcaagttgacagtattaactatcacaagtccaccccttgtcaacttgaactcatacacatctgagatcatacataatcttcaaataaagacaataataaggtcctaattatgcctaacatactataactatccttcatacaaccagaaacacaccaatccccaactcaaatactattacataaagttaacaatacttaaatgctgacgtgaagtcagtaagtattatgacatatgataaaggaaaaggaaataaaataaagatgatttcttagtacaagtgtatacatgcacaaacatgtttttaacaaaagaaggaggaaattctcatgacagttatagtccccatttctgcaactggtcacatggtcataactggtattgatgactaccttcttctactacccattctgtattccctttgccttcagcaagcacctcagcaggtcatggtttttttccctggtgggagttacccaaacctttattcctgaggggtctgggccattcgtagtcctgcctggattgggctgttgtagtttcccatggaccttaatcacaggacatggtaatactaagagatgtcttaatggtctcctgtactccatgcatactccttacctccattgtggagtagtagactgatttcatcttgataatctgggccaaccaccccatccaacactgtaactcccttctttgcctattgacttaaaagtaggaggagcccaaagtgtccaggtggcaatcttaacttccagtttaatggaattcttgttgtgtctcctggtggcagcattcctccctctggaactaagaagtctaggccagcagaacatagtgtcatgggaataggaagcaaaaattgtcctagtgaatccctaggggtgatggtgagtggtgccacttcaacttccaccccttgattcctgggcccatgaatcctggctatgagagaaacagtaccatatattggatgctggtttagagcatacgcaaccttctggagaactttgcctcagccctgcaagtattgtcacctagttggcattgtaactgtgccttcaaaaggctgttccatcattctttcaatccagctgcttgaggatgatagggaacatggtaagatctgtgaattccatgagcacaagcccactgccgcacttctttagccgttaagtgagtgccttggtcagaggcaatattgtatggataaggcattccatgagtccaccaatggcagtcttggcagaagcattgcatgcagtacaggcaaacccatatccagagtaagagtctatttcagtgaggacaaggctctgccctttccatgatggaagaagttgaatatgatcaacctgccaccaggtggcttgctgatcaccccaaggaatggtgctatatcgagggctcagtgttggtctctcctgctggcaaattgggcactcagcaggggccatagccaggtcagcctttgtgaatggaagttcatgttgctgagcccatgtgtaacctccatctctgccaccacggccacgtttttcatgggcccattgggcgatgacaggggtggctgtggaaagagactgagtggtgttcacagaaggggtcaccctatccacttgattattgaaatcctcctccactgagttcacccgttgatgagcattcacaggggatacaaatatcttcacagtttttgaccactctgagaggttcttccccaaatttctttgtcaccaattttccaaccatgcttctttcaatccctgaccatccagcaaaatcactggatatggcccatgaataagtatataattgcacatctggccacttctccttctatgcaaagtgcacaaccaggtgcactgctcaaagttctgcccactgggaaggtttcccttcaccactgtccttcaggaatgtcctagaaaggggctgtagtgctgcagctgtccactttcaggtggtgcccgcatattgtgcagaaccaggccctagtattctcttcctctgttgactgattatagggaactctccatgaggccattagtgcaggctgagggagagaaggcagagtggcaggagtggagaccatgggcatttgaaccacttcctcatgtaacttacttgtgccttaagtacctgctcaagcccgatcatgtatataccacttcaatttgatgatgcaatgctgctgtgcacgatccactctatggctagatgggtcagaaagcccccagttcatgatagacaattcagctctcacggtgacttgatgacccatagtcaaacgttcagtttccaccaaagcccagtagcaggccaaaagctgtctctcaaaaggagagtagttatctgcagaagatggaagggcttgctccaaaatccttgaggcctccgctgtgattcacctttgggggcctgccaaaggctccaaacagcatccctatcttccactgacacctcaagctccattggatctgctggatctgggtcatatggcccaagcgggagcagcttgcacagcagcctgtacccgttgcagagccgtctcctgttttgggcccacgcaaaactggcgtcctttcaggtcactcgataaacgggatggagtaacacacccaaaagaggaatgaatgtgtttcctccaaaatccaaataggccaactaggcattgtgcctctttcttggttgtaggaggggccaaatgcagcaacttatccttcaccttagaaggaatatcttgacaggccccacaccactggatcccctggaaattttactgaggtagaaggtccctgaattttagtcagattgatttcccatcccctggcacgcaaatgtctcaccaataagtccagtgtgtttgctacttcttgctcactggatccatccacatcatgtcatcagtgtaattgaccaatatgatatcttgcagaagagaaaagcaatcaaggcctctctgaataagattatgacacaaagctggagagttatatacccctgaggtgggcaataaaggtatattgctggccttgccagctgaaggcaaattgcttctggtgggtcttatggacaagaatggagaaaaaggcatttacaaggctgcatagcaggtaccaggaaatgtgttaatttgctcaagcaatgaaaccacatctggcacagcaagtgcaactggagtcaccacatggttaagtttaccataatccactgccattttccaggatccatctgtcttctgcacaggccaaatgggagagttgaacaggaatgtggtaggaatcaccacccctgcctctttcaagttcttcattgtggcactaatctctgcatccctctagggatgccatattgtttttcatttaatttactattgattttgttttgatttactatttttctaggtagaggcagctctgatggcttccctttggccattccaaccataatagccctcagcctaccagtcagggagccaatgtgggtgttctgccagctgttaagtatgtctatgcaagttatgcattctggcacagggaaaatgaccataggatgagtccagggacccactggacccactgtaagtcggacctgagctaaaactccattaattgcttgatctccataagcacttactttaagtggaggattacaatgaccttttttggctaacacctataatcccagcactgggaggccaaagcagacagatcatctgaggtcaggagtttgagactagcctgaacatggtgaaaacccgtctctactaaaaatacaaaattagctgggtgtggtggtgcatgcctctaatcccagctactcgggaggctgaggcaggagaatcggttgaacctggaggtggaggttgcagtgagctgagatcccgccattgcactccagccagggcaacaagagcaaaactccgtctcaaaaacaataacaacaaaaacaaaaacacaatgatgttttgggtcccctggaatcaacgtcagttcagagccagtgtccagtagtccctgaaatgtctcatcatttccctttccccattgcacagttacctggtaaaggccagaggtctccttggggaaggatgggagaaagattcactgcatattgtcggtaatgtagtggggtccttcctaaacaggatccaccctccccgtgcattcaagatgttctgggtctgtaaactgactcatgtctggaaattgtttgaggggccgtgattctctgtttttataattcaaattaatattttgtccattcgacctagaaattttctgcttatataaattaaacaggaatgctgcagtcttcctatcaatttcagctctagaaacactgtgattaattagccaatgccagagctctacacgagtcagactattctgattgccactttgcctctgctgtccattatggtagctatgcctaccttgaggttgatagttgagtgctgtcacttggtgcctaccacctcagcatccaattattcccattgtatttaaattttgtagttgtgtgacttaggttcccaccgttagatctgaaatagagagacgagcaattacagggctcttcaacgatgcaggcgctgccctcactatttcacaaggcatcggtcaagggtatatcttctggaccctcccagctgggacgtgtaggtctaaagtgactaatccattccaccatcccaagctccctaagcctttggatcccttccttgacattaaacctagggagatcaggcatttccagctgactcacagtgggctatcttttaatccatatttcagctaaccaagcaaataaactgttagaaccttttttaattccctgagtgcagcactaagacagagtccctacttactgggcccaaatcaataaattcagtctgattcaactctatgttcttccacaattatcccatacttttaatatccattcccatgcctgttcctcagatttctgtttatataaattagagaactcaaacagttctttttgagtgtagtgcacctcccatgggtcacactctcaacctcgcctctaggggcccatagggactttagtctagttataggtctagaagcaaacagaagggttggggtggctgctgaggagaaccaacattatcttgcctggcaactgcctcaggagaggccatcattgttgcctcaagcagcgcagggtttatctcctcagacaaaagtggaaaggctgacggcagcatgagttggggaggaaattatgccactactggggatggggaagctgttccttctggcaaaaaaggttcatcagagttcacaaactcagtgtccccagcttcatcagggtcctcccacacatccccattccaacttgcagcatcccattattttccaatcaatgccctcactttaacagtagacacctggcaaggctgtgcatgcatctttccttgcaggtacaccactcactcgtatgataagagcttgtctgttttttcacagtttcagctctttctctacaggagataagactctcactcagggcaatcttagcagatttgaggctcagtgtctgcttctgaagctagaagacagaagctctaagttcatcattttctttcatcattatgtccactgaacttaggagcagccaaccaccttcattattttccttggatctccacatatagtcaaaggtattatgtatagagtcactaaacttcttgcctcttagccagtggtgaatcaggagtgtcaaatgcatttattttgcactactctcttgacagttcacgccaaggactatcagtgttctccatactgtgagaagtagagtcttttgcatttttggatctaatcatattaagcagccaactccagataaccccaaaaccagtgaaagaactccatccttaatattctgtttctctataacccttcctcgtaacaaaatctttattagtcagggttctctaggacagaactaatacaatatatatataaaggggactttattaagcattaacttacacaatcactaggtcccacaataggctgtctgcaagctgaggaggaggcagagccagcccgagtcccaaaactgaagaacttggagtctgatgtttgagagcaggaagcatctagcacgggagaaagatgtaggctgggaggctaggccagtctctccttttcaagtttttctgcctgctttatattcgctggcagctgattaggttatgcccatgagattaagggtggatctttcttccccaacccagtgactcaaatgttaatctcctttggcaacactctcacagacacacccaggatcaatactttgtatccttcaatccaatcaagttgacagtattaaccatctcacatatatattttggaagctaataattctcccaaaggtatgattttcttttatttaaatttctatttttctactaaaataacaacattaacaacaataaagataacacaaaagctataatatattaagatacttcagaataaatgcaaagtagacagatgttaaacacaaaattagtttatgttgtgccaggctaggtttttattaagactttatgtctactttgtatctatcctatgaagctcttttctttttgtctttattggtattttcatatttatagcttacttgattgtttcatgatctggccttcgtgtgagtgtgtgtgtgtgtgtgtgtgtgtgtatgtgtgtaactttagaagtctgttatatcatggtatgaattaactgcctaataaataatcactataatttttactcattttagcaagtataacttcggattttttaaaatgtatttttataatatatggctcactgaatgataaaatatcagagaaaaattagaaatgaaaatacatgaaaattcctgagagtaggcactactttagggaatataagaggcattgtttccctgaattcagaataagatcatgtctctaatgtaggataatatgatagaaagaagcagtggactgaatgcaaatgacaacgtttagtattctctgtggtaggaaaagggattagggaatatttcgttcatcttaacaatttttttaactcattatctgtacaataagagatttgaacaagatattctctagggtctattctaattgcaaacttttgtaactttaatggaaaacaatttaaaaataaatcaaagtttgtttctaatgaatgctatttcaagtttcattgaatagtttaaatgaataatatcgcatcggaaggatcccagaagaccttaataacaaaaaatagtggttaggggggaacaccactgtgagagagtagaacatttttttcttctcagttattactaaaaatctttagtttctatttcccatttgatctgattttatacaggtcattataaatgtctctttgcttcattgttttaatttccccagtattataaaaaagtaacaaaaaagtcaataaattgggcaattctgtaatatgtattttgataattctgaatctacctgcatgcataattgtttctgataataaatattggttggttgaattgataagaattccaacaattaacctagaaagtgtttaatctgatttgacttggtgagatagcttctttacaggttgttacaatggagagggaaatttctgggtaaaagattattaaaaggaaaacaggcaaaatctgtagcgttaaataattttgttgatgaaaatttaaaagtcccagaaaatgtgaggaaaaatcaaccataaatcacagaatttatatatatatatatatgtgtgtgtgtgtgttcgcacgtatatatagccatactctaaatctctgttgtgaattaagaactcacgtttctttgaatgcatacattgtttcattatttgtgcttaaatagtgaaacacagatggcagctgttttaatttttcctttatcaacaccagatagatttggacttttctttacttgtaagaaaactctacatccttctcattttttctgtgaatttcatgaggtttatgttttcatgtacacttcagacctcataattttactttgcaaaatcctaaatagttactcatgttatcatatgactatgactcagacattgtacttcttgggttttttaaatccagaagggtaactgagaccatttctctgatttccactgaaaacaagaacacaataatccagaaagacagaaaaaaagaaagaaaagaacaaacgaaagaaagaaagagaaaaaaaagaaggagggaaatcaaatccaatgagaaatttggggttttataattcataatagaaatgaaaagatcttcaaagagaccttttcaagaactgtgaagtgtctgtgatgttgccttacttgcaagcaatttagcttgccatacagttaattgcatgctggaagaagacaaaatcttattggttcagtgaaacagacttcattactcagggcacagcacacagcatgagattcatgtttgtttagattcttcttgccccacgagtctctctgtggcgatatggaggggagggctattccagctgaatggtacacatctagtggctttaagctccagctgagaaagcccaggcttaagaaacgccatctgtagtaagtgggctgcaaggaaatcagctcaacctttccaacagatggaaactatctttcttaaactagacaacagacaaatcagtcctctgctctggaatgagacaatatctctcttttccaaggcatttggttatacaagtaatctcaaaaagatagtccagaacaaaagttgtcaacaactctgctcaaaagagatagagaaatgagagagaactatgaacaatagttttctgattgtctcattgtatgttagttctataaaatggtctgaggatgatgctttttgttccttatccctttctttttctttcagagtttgctttattctattctccaagtgccttttatttctactgttaagcagatcaactaatcttgctttcagtggcttgtattaaacaatattctgaaaaacttatattctactccaaggaataaattaatatttttaattaaaatgattcttcggtcttacagtggaattaaattcctagttaacaggaaattatttttccatactacttcaataattatttgccaaacctagagatcacacattttgtatttatttgtttcatttcaaggaacgacaaatatatctatacgtgtaattctgttaagattacacaaccaaaataatttcatatgtaaattaatgccagaggccttcagatccagaaaaagaaaaagatgttgctagcttctaatcccaagattcaagctagtgcttatgtttctaaaattatttacctttactggtagagttaataaatgaaaaaaaattgaggtatttgtacattaccttggatatttcaaatatagagagaacatgtcaaaattgcctaaattacaaagaagaactcccttgagcaattagagtgactggcatgaggaagtagacatgagacatgtatgaaagaataagaaaaagagtaaaaaaactttaaatatgtaagtaaaatatcaatggaacataataagtgaaataaaatgtacacttgaaaatcttaattgaaacaatctgacacaatgtggcaaagcaaaattttaatgaaagtcatataatatataagcacaaatatatgtatgtttgtgtgtaaatacaaataaatcatgtttataaataaaatacaaataatcttttgtatttataaacaaatcatatatgcatatatcatataacatatatacatacgcacagagagggagagagagagagaaatcatagtatctgaatttggtagctgcattatgaggaaataatgatatctatgaagataaaaatatgaaagaaaagcaataaacgttattttgctctctgtaatttaaaatatttagtaactgttttgagataataaaaaagaaccattttagtaataatataaatattttagttgtcctctgatataatgtctggcacctccctacatttcacgtatttaaatcatttaaagatataaatatatgttaaggtctaattatatcataaaagtctgaatcacctttaagtaatttactatttcattcatgtaagggatgcataaatatgcttgctgaaaaacctttttaatacgaaatatactgactggtcatgggtataatggctacattccaatgcttctgaatggccctttgtttgtttgtttaagataaatattatctataaactactaaaagccataggagaaatggactggcaaatctgaatttctgtattcataatttggccaggttaatggcaagctctatgatcctggccaagattgttcctcattatgtttatacaccttcatagtgagcctattggcgaacatgacgcctgtgttatatttgggcttccaaattctatgttaatgacagaatcctgctctctaaagcaaaccttgcttacagtccattgcagtcctgctttcatgtggagtgttcacttctgcaacatcaagaggaagtctcccatttctaactcttgatttaacggatgagtcaaatttgaccaatacaacaaagcagacagggttgcaatgttttacatgaaaaacatctgagcgtgctatggttacaggcaacagttcattttgataatttttaaaaggaaaatataaataaagaaatgacagagaataggatgattttacaaaggtgaattaaccatggaatcacagaaaaaaagataactaaagtacctaaatatacaattattctgggtttcctgggaactttaacaattttgttttcagatctactttatttcatttttttcctcatctgttttccatgttattttatattttgtagatcctttctgaagcatctaaaaactctcaagattgggaaatctaaaaatatctctgcaaaatataaagtccttgttaaataaaaaacaaaaaacttcaaatatacatttgaaggtataatactacataatgcaaatttgaggcaacattatttatgaacaatgtgatacaaacaaacaaaacagacattttaattcataatggcaataagacagttatcaggaaaattaataaatgacctacaaatatcaagtagtattttccttagatttaagagatacattaaatattcaactaacatacacaattccaaagctattgctgaagaaactaaggtaatggagaactggatgttattactgaaagattcagtatttgcaatatctagcattttgttcagctttacttcctctggtacacttgaatgtctaaaatctactcccctactttgaatcaaagaccttaagaaattttaaatacaagaaaactgtccatcaaaactgcagtttttgaaaaaaaagttttacaagaaaatcagtgttgaaaattttacttaagactttgaaaagtaactgaatttccaatcacatagcaacactaacaagataattaaagaaaaaaatgccaattgagttataagaatcaccaaaaattaagatcaaaagaaacttccagagagagttttatttcatactataaatctcataaggggaagaattttggcttataattcttttttcatccttagaacctagaactttgaggaacatattagtaactaatgatgacattttcttgactagtacaatcaaaatgatattagcttctttcccccaaaaaagagcaaccttggtcaaattgggatatataactttttgttttatttttagaaaaatatatattgaagcattctaattgaggaaatatatttatcatattttaactttctaaaatatttttctcaaataattttctcttattatttagttcttgcttaaaagtgagaacatgtggtattcggttttctgttcctgtgttagcttgctaagtataatgacttccagctccatgcatgttcctgcaaagaactattttttatggctgtatagttttccatggtgtgtatataccacattttctttatccagtctatcattgatgagcatgtaggttgattccatatctttgctattgtgaacagtgctgaaatgaatatatgtgtgcacgtgtctttataatagaatgatttatattcctttgggcatacacccagtaatgggattgctgagtcaagggctatttctgtcttttacacacagacacgtagaaggaaatgacaaacactgaggccttttggagggtggagggtgggaggaaggagaagatcaaataactaatggatactagactttatacctgggtgatgaaataatctgtacaacaaatccccataacacaagtttacctatgtaacaaactgcacttgtacctctgaacttaaaataaaaattaaaaaataaaataactaactaaaacaaatgaaaatagtaaatttctcttattttccttacgtagtttaaaataaggtctttcacttaaagatggtggatttaacatgtgttttccttaatactttctgaattcccaacaataaaaaacacaataaaaagacctgaaaaggaggaaagcatgcagtttacaagaacgaacggaatagtagaaaaatggcaggttaaattttttttcttgaaagttgaaaagcaaataaatttgtgataattgacttagactgagaaagcagagataaaaaccaataggaagctcagatgtcatctatgcgtcttgcaaaatctagaataggttcaggttcttatgacaccaagtgccctcaaagtggctgcaaggtttaatttaggagaatggtttgaaagatacaaataggcttctagaaaattacccaccagaggtaatatgtacttaaggaaatcaggcacagctgaggtgggactaccatatggaaaatcgaaagattaaaagataatgtgttaatttaatgatgcggccgttgttccagctctattctcctactttaaatctagcatgcaaaaattcaagctttcgccaacaagtaagatgaatgatagttttttaaatgaagaaaataatgataccagagaaaagcatctagttaatggcatttctttgtcctcaagggaaaactcaataataccacaccctaaattgaggaccctttgattagtcttcctgtacaaatgcatagtagtctctttccctgtcttactcttcaacataacctgccagctaagatggccaaaattagagaaaattatatgctatgaaaaagagtaaaatcaaactaaatgacaaacaaattgcagcagatagtccaaacaagaagcaggaaatgttttttaaaactcaatattttcatagagataaaagaagataaaacacccatatatctaggacagtatgccattaaaataaataaataaataaaaacaaaaccaaaatagttgatttaggtaaaaaagtaaatatgatatttgtagtatttcaaaagtagatatctgaaacggtatttttctttcttcctaaaatagacattactacattcccccataattcaatacaatctagcaaatatgagtagaagtaaggagcagaacatacctaaaacttaacacattctagcaaagaaattcactcactattctcttttaaattacccagcacatagcagatttttagtttgctttgaattgaaagaactgatttctctgagaaatagcataatatgtttgcttaggtgtaccattccaacaaataattcaaatactcaaagtcagtagaacctaaatcaaaagcagaaatattaatttccttttaaaatatttaaatgtttaaaatgttacattactttaggtttataatctgaaaaaaaaagtatatattcatagtactgcttatgcatatttaatcacatatttctaaagcagataatctaaactcagtatagtaatcaaattttagagaaaatctaaaattttagtataatatgtactctaaattttttttttaatttttaacataatgtgtagttttttgaaattaaattttgaacccatgaattttggttttattaagagtaagccagaatgccatgaactcaaaaatgaaaaacatcaaattaaataacaatcacaataatactctgggatttaaaaattaacaaaagatcaaactgaggaaatgaattaggtatttaagtagttttgtttggttggagttatgaaagattacataaatgaataggcaagtacaaatagtgtgatttattttgccacagaaaataatggaaattctgagttgtttatttaaattttgcactgaaacataataaaagtataaagcataaactaactgaaaagtttctaaacttctacactctaacattgacatatttcaatttagtaaagacttttagccactttaacaaacaacaaagccagctgacatttatgcaagcagctcttttctctttccagtaacagcttaaaattgtctttttggaaaacaccatacaatttaattattattgaacagtcagaaggattagttagtagagaatataaatcagcagttttattaaagcatgaaattaaatacctcatatagaagacaaaagcctcaagagtttaaagatggtgctattgacatatcagttcattctaatataagtgattagtagttgcatttatataaatggttggaagggtccggtggtattaagtgcacacaccaaataattctatcaaaatttttaaatgtcttaagcttatattcatttaacagctcaattacatattctcattcacataaaacacccagggcaaattttcataactgagggaaatgaggaattgagatgattatcccaataatttagactcaaaatcacactaggggttccaaggaactggaaagcgggaacaatttatactttgaatcaaagaagcaatattctatgatagtttcctaacttatgtaactaactcttttggctcacatgttttttcagaaacctgaggaggggaaaggagaaaagtaatctttggggcaggcatgaccaggtgatgggcaactattaagtgacctgagtatgtccttcattcctctgctgaactgaaaactgtgttatcctttctattaaaaatagtctaattacatgcagctgagcaaaacatcaggttttctacaaaagatccacaacataaattctagtaaattaagaaaaaaacttggccaggtgcggtggctcacgcctgtaatcccagtactttgggaggccgagaaggggggatcatgaggtcaggagatcgagatcatcctggctaacacggtgaaacaccgtctctactaaaaacacaaaaaattagccgggtatggtggcgggcgcctgtagtcccagctactcgggaggctgaggcaggagaatggcgtgaacccgggaggcggagtttgcagtgagctgagattgcaccactgcactccagcctgggcgacagagtgagactccgtctcaaaaaaaaaaaaaaaagaaaaagaaaaaaaaactctaagatctctacattggaagagaataaatctggcatatacattgcattcgagttttggtacctaaatgcagctttcttataacacatgtcaggttgcatgcatgaaagtaacttaatattttagcagtctcccttaatattatagtcttagcattcataagcaggtgctccgctacttccaaattgtggaggtggggaacagaagagagagatggagaaggagaggaagaaatttaaaaaggaagcatttggctgggtatattgggtggctcatgcctctaaacccagaactttaaaaggaggccgagacgggcagatcatgaggtgaggagtttgagaccagcctgaccaacatggggaaatcccatgtcaattaaaaatacaaaaaatagctggacgtggtggcctgcgcctgtgcctataatcccagacactcaggaggcaaaggcaggagaattgcttgaacccaggagacggagattgcagtgagccaagattgcaccactgcactccagcctgggcaacagagcaagattccatctcaaaaaaaaaaaaaaaagaaaagaaagaaatgttttacatatttagatgatttgctgctaagacaatgcaaagctttagtattatttgaatagatttgcaataattgatatataggtgagctcacagctcctcaacttgactgacatatttgagcatgttgtttcaaaacacctaatgaaattatttttttttttggtagtggatataagctttttaaaacttctttttcttgacagttgtgtaaatcttttagataagattttcaaataccaagagatcactcaaacttcagaggtaacaattaaagaagcctattaaaactagcctctataaacatgttaaaggcattaagttccaatctatgtcttcgtaggacacaaaatagacaaagaaaagtgactatgatgtagcctttgatctgaatgtttgtaacccccccacaaacatccccctgcaaagttcatatgttgaaatccaagtccctgaataatggtgtttgaaggtggggcctttgggaggtagttaggccacaagggtgaagccttcatgaatgggattagtgccttaataagaagccatagagctagctctagctctttctgcaagtgaagatgcaatgaaaactagtagtcagctgggcacgttggctcatgcctgtaatctcagcactttgggaggctgaggtgggcggatcacctgaggtcaggagttcaagaccagcctgaccaacatgaagaaacccccctctctactaaaaatacaaaaaattagccaggcgcggtgtcaggcacctgtaatcccagctactggggaggctgaggtgggagaatcgtttgaatccaggaggcggaggttgcagtgagccgagatcatgtcactgcactccagcctgggcgacagagcgagactttatctcaaataataataataatgataataataataataatcagcaaacttgaaaaggctcctcataaaacccggttaggatggtgctcatctccaatttccatcctccaagactatgagaaataagtttccattattgataagccacacagtctatagtacatttttatcattatggcattttaacaaaatcacatatctcacttgcattactttaaatatcttcctcaaatatttaagacaattatgtggctaactttgcattagactgggttgacaaattgttattctattcatacactatataaacaatgtatagcatttcatctttatataaaatttcacccaaattcaagcttgttttatttatttccttatttttggctaatagtttcaggcaaggaaatatcattggtcaatattgaacatcagaaatgttgaagtgagtaaatttgaaaaatcatagctgaaagcaatctagggaattaaacatgctttggacaacactatttctccattttaattgtctgaactttttggatgagtctgctattgccaagcaattcacatgttcatgatataacacgaataatgttaaatggctcactgcactctcatttaaatgcagtaggttatttttcatgattttgtttattcctttattatgaagactggtaaaacaaaataaaattccaatcattataggggtttaaaataaaccaaagttcatcatcataaaatgatagaataaacattttatcacaaaactttcacttaagacataaaatgtcttctagggtttttatggttttaggtcttacgtttaaatctttaatccatcttgagttaatttttgtataaggtataaggaaggggtccagtttcagttctctgcatatggctagccagttttcccaacaccatttattaaataggaaattttttccccattgcttgtttttgtcaaagatcagatggttgtagatgtgtggtgttatttctgagtcttctgttctgttccacatacgcatgggcaatgacttaatgactaaaacaccaaaagcaattgcaacaaaagccaaagtagacaaatgggatttaattaaactaaagagcttctgcatggcaaaagaaactatcgtcggagtcaacaggcaacctacagaatgggagaaaattttgcaatctctccatctgacaaagggctaatatccagaatctacaaggcacttacacaaatttacaagaaaataaaaaaaaaacatcaaaactgggcaaaggatataaacagacactttcaaaagaagacatttatgcggccaaaaaacatgaaaaaaaggtcatcatcactggttgttagagaaatgcaaatcaaaaccacaatgagataccatctcatgccagttagaatggcgatcattaaaaagtcaggaaaaaacagttactggagaggttgtagagaaataggaaggcttttacactgttggtgggcgtataaattagttcaaccattgtgtaagacagtgtcgcgattcctcaaggatctggaactagaaataccatttgatcagcaatcccattactgggtatatgcacaaaggattatgactcattctactacaaagacacatgcacatgtatgtttattgcagcattattcacaatagcgagaacttggaaccaacacaaatgcccatcaattttagactggattaagaaaatgtggcacacatacatcatggaatactatgcagccataggaaagaatgagttcatgtcctttggagggacatggatgaagctggaaaccatcgttctcggcagactaacacaggaacagaaaaccaaacaccgcatgttgtcactcataattgctcataagtgggagttgaacactgagaacataagggcacagggaaggagggaacatcacacaccggggcctgttgggggttagggctctaggggagggattgcattaggagaaatacctaatgcagatgacaggttgatgagtgcagaaaactaccatggcacatgtaaacctatgtaacaaacctgcacgttctgcacatgtatcccagaacttaaagtataattaaaaaaaaaaaaaaaggtaatgataatctaattcgtggaatttctgaaaaattgacttctaaactgtaagaataatttggtttacagcatgttctaccaatatggaagtatttactgaaaatattgaatgacatacatatttgaaaatgatagatctttccatgtaccataaaaattgagtcattgtcaacttagtgtttgcttttcccaagcaaattaaacatttattgctggaagaaatgaaaaacatggctccacaaccctttctgtgtctcacattggatagtcagtattttttgcacagaaggacaaccatcataagcaaattaagtgattgcctatgacatttctcccaaatatttacagataatttttaaatgtaatttttcaataacgataaaaggttaaagtgaagacatcattcaaaggtgggcatgacagtgtagaaaccaattagggaagggtaggtatatgtaaaataggtgaagggtggggaaatcagaggaaagcccactaaacagggagacaagttgccaagccagtctgaggatttaacttgtagcttgactttcaggctttaaattgtcttcggcttagaggtgacgtttcaccagggacccacccctatctgcctaggcatttggttgcctcctgccctctcacattgatgaaatgcattacgaaaatattaaaactaacaataccaaatgtataactagctatattataaaaaagaaaatgtaataatgaaaactgttaagatctaatctttcacatattcggtattcactggtatgaaaaagggtgatctagtgccatttttataactttcccaattagtgaagaataaacacacttgggaacataaatatttagaagtaggtacaacatacatagtcaaagatcaaacttttgtcccacaatttaataatattagcaagaaaattaaacaaaaacaaaatagcaaaaaattcgggatgaattatcactttataactatttaaagctactttattacagtaacattttttcctctatacctactgaaaaatataatacattttactggaatcacctaagatatcaaattggttaaatttaacatttaaattgtatttttataacccaggaattttacattccacgtaaataaatgataatggaggagtagaattttcaataactaatatatttactctttttcagataagtgccaatgctgatttttggtgctaaacacatcacatacagattcacagtttggaatgtagcaagcgtgttaacattttctcctcaagcgatatatttttctgagctgtgttagaagtgaatgttgtgtttcgttaaaaaggaaatttgcatgtatagcttgtttatttctagaatgtgttgttggcttacctttaaaaactcaaaatatctaaggcttgaattctagctgggtgatgggatcattcatacgccaaacctcagtaacacaaaatttgtccatgtgttgaacctgaagatgtacaccttaaacctaacattaaagttgagagaaaagaaataaaataaaattaaaataaaataataaacaaaaatatctaatgcttgcttggaatcatctttgtatgagaactctagaacttgagtaaagaatattgccttgttgcaacaagttgcttattgaaaatcagattcctttttattttttacagtggatgccttatgatgggtactccggaagcagaaaataatacagaatgtgagtcttaaggtatttatcaggatccacacctgtgaaaagaatgggaagaaacaggattggcagagggagaatgtgagctatgacaaatgtgcagacaatttgcaaagagcatggcttgagattttcatatgagaattgtcctccataaggccaaactggctggactttttcttctccacctagatcatcccctgagaaggttgagagcttgaaccagtgagctgtctgcaaatctggaagatcccgaagtgtctgatgaccaggtcaactccccagagccataggacacattttccctcgcaagagtatgtaagcagcctgtcaccatgtctaccacagtgtaacccttagacagatcatctctaattccacgtgaacattgaacaggtggctctgctatgaagtgatggaccacccttcctgagagacacttagaataaggaagttagtgaaactttgcttatctggtatggtgacctttaccctgattcatgatgtgcttgagcctcctggtcaccatgtacccaaaggctgttttacttgtccatttacattcatattttcacaaaggaaggcactaaatagatcatctggttcccaggcatattattcttttctctctctctgtactagagcaaccttacctcctcctgataattaattcctgccaatttagtacttctttcttttgcctactcttccctttacccaaagaatcaaaatttcacaggaaacagccatcattaaattaaattaaacagaaatgtaattttataattaaattagaattaaatagaacttttgctatgtctcctagagaaattgtgctgccattacagactgagacctctaatcctgcagaaccctacatgtaggaacaagaagcacaaactcaatggatcattgtgaatgacagtaagtgggaatgctcatgcttctgtgacttggttccaggcctatgggtgcttcatgctaggaacacaatgtctttgattcattgtgtattctacatctagaaggatggcacccaagtttcatctgttattatattcacacttgaatttcatatagactctgagcaggcaatgctctatgagagtagaagtttctggatggtataagatcagtgggtatcataaacttgagcccctttcctcactctttgctgtaaggcatagaacatgaggccaaggccgtgcatgtaagaaaaagaaactcagatccagaattcatgtatatttacatgagaataagccacccaccattgcagagtagaaaggctgattttaggcaacttgtcttcaagaggccatctgatctccttgagaattaaattcccgttggggtttagctttcagctttcttgctgctgggatagacatttggtggtgctaatagctagaatagtcatatcgatatcttcatacttagcctccatctctgccactaaaaccactttgttcatgtgcccaacatgccaatattgatgtgtccagtgactaagcccggctaataaaatttgcttgctgtattagtctgctctcatgctgctgataaagacatatcttagactgggcaatttacaaaataaaaatgtttaatggactcacagttccatgtggctggggaagcctcacaatcatggcggaaggtcaaagtcacatctcacatagcagcaggcaagagaaaagagcttgtgcagggaaattcccctttataaaaccaccagatctcatgagacttattcactatcatgagaatagcacaggaaagatccacccccatgattcaattatttaccaccaggtccctcccacaacacgtggaaattatgggagctacaattcaagatgatatttgggtgggggcacaaagccaaaccatatcacctggctattttttatatttggctctttattgcatgtgctgtgttgaagtgctctctggtgggcgttaaaatgtgataaatattactcactgtctctactctgtaattccttgttccctgtttcttccccttccccctcctcctcctccttcttcttcctctcctcctcctcctccttcttcttcttcttttcttctgcttcttcctcttcttcctcttcttctttttcttcttcttcttcttcttcttcttcttcttcttcttcttcttcttcttcttcttcttcttcttcttcttcttcttcctcttcctcctcttcttcctcttcttctccttcttcttcttggtatttgtaaccatttggctagaaaaattgctactgctaaggagtctctatatattccacaaactgtaataacagatacactacctgaagtcctggccagagggaggatttcccatcacccctgtttgccaaggccacattgagtgaaactgtagtaagctgccaaacatttatggcttatgtccatgtagtgatgggtaccaccacccatgcacgcattgattcttttaagtatttttattttaaaatttttaaaataatttcaactttttttttagattcaaggggtatatgtgcaggtttgttacataggtattttgcatgatgctgaggtatgggatttgaatgatcccatcacccaggtagtgagcatactttttcaacctttgttttgacaattagtttttcaattcttgtttacctgcttccctcgcccctccaatagtccccaggatctattattcccatctttatgtccatgagtactcaatgtttagctcccatttataaatgagaacatgtgatatctggttttctgttcctgtcttaattcgcttaagataatggccactagctgcatccatgttgttgcaaaggacatgatctcattgttttttatggctgcatagtattccatggtgtatatgtaccacattttcttcatccaatctgccatggacgggcacctagattgattctatgtctttgccattgtgcatggtgccatgataaccatacaagtgcatgtgtcattctggtggaatgatttattttcttttagatttttgggtcagatgtagttctgtttcaagttcttcaagaaatctccaaactgtttccacagtggctgaactaatttgcattcccaacaacaatgtgtaagtgatctcttttctctgcagtctcatcagcatctgttgttttctaaactttttaaacatagccattctgatttatgtgagatggtatctcattgtgctttttcaagagtggaaaaaaatctccatcatttttctgggatggaagcctgggcctgcccactgactccatttcaattcagcattctaagagtgcctttgtttctttaacttttattttaagtttagaggtacctgtgtgtatttgttatataggtagacttgtgtcatggggatttgttgtacagattatttcatcacccaggtattaagtctagtaccaattagttatttttcctgatcttctccctcttcctacccttcaccctccaatagatcccagtgtctgctgttcccttcttctacgtgtccatgtgtaatcatcatttagctcctacttataggtcaaaacatgtggtatttggttttctgttcatgtgagtttgctaagggtaagaaccttcggttccttccatattcctgcaaaagacattatctcattcatttttatggctgcatagtattccatggtctatatgtaccacattttctttatcccctctacctttgatgggcatttaggttgattccatgtctttgctattgtgaatagtgttgcaacaaacatatgtgtgcatgtgtgtttatgataaaatgatttatattcttttgggtttatacccagtgatgagattgctgggttggatggtacttcgatttttaggtctttgaggaatggccacactgtcttccacaatggttgaactaatttaccctcccaacaacagtgtataagtgtttctttttctccacaaccttggcagcatctgttagtttttgagttttaataataatcattctgacttgtgtgagatgtttttctctttggttttgatttgcatttgtctaatcatcagtgatgttgagcttcttttcatatgattgttggctgaatgtatgtgttcttttgaaaagtgtccattcatatcttttacccactttttaatggaattatttgtttgttttgaaacaggatctcactctgtcatctaggctggagggcagtggtgcaatttcagctcactgcagcctctgtctcctttgttcaagggatcctcccatctcagcctcccaagtagctaggactacaggcacacaccaccacacctagcgtttttgttgttgtaatttttatttttatttttatttatttattttgtagagatgtggtttcaccatgttgcccagactggcctcaaactcctaggcccaagtgatcaatctgctttggcctccaaaagtgctgggattatagttgtgagccactgcacactgcctgtttgtttgtttttttcttgtaaatttttttaagttacttatagatactggatattagtcctttgtcagatacactgtttgaaaaaattttctcccattctgtgggtggtgtgtttactctgctgatagattcttttgctgtgcaaaagctcttaagtataattaaatcccacttgtcaatttttgttttaattgcaataatttttggcatcttcttcatgaaatctttgcttgtttctatgtccagaattgtaccgcccaggttgttttccagggtttttatagttttgggttttacatttaggtattttttaaatactgaattaatttttgtatatggtaataaggaaaggtctaatttcaatcttctgcatgtggttagctagctatcccagggccatttatgaaatagaaaatcctttccccattgcttgtttttgtcagctttgtcaaagatcagatggttgtagttgtgtggctttatttctgggctctctattctgctttattggtctaggtgtctgtttttgtaccatgaccatgctgttttggctactgtagccctgtattatactttgaagtcaggtagagcgttggctccagcttaggaggtatcctaagctggatgttctttttgctttggattgccttgactattcaggttcttttttggatccacataaattttaaaatagttttttctagttctgtgaagcatgtcattggtaatttaataggaatagcatttaattaaaaaatttctttgggcagtatggccattttaacaatattgatccttctaatccatgagctgagcataggatgtttatttgtttgtgtcacctctgatttctttgagcattgtttgttagttctccttgcatagatatttcacctcccttattaactgtattcccaggtattttattgtttttgtggcaattgtgaatggggttgcgttccagatttggctcttggcttgacccttgttggagtataggaatgctagtgatttttgtacactgatttttgcatcctgaggctttgatgacattgtttatcagcttaaggaacttttgggtccttactataggattttctagatataggatcatgtctgcaaacagggatattttaacttcctctcttcctatttggatgccctttatttctttctcttgcctgattgctctggccaggacttctaattatatgttgaataggagtagtgagagagggcatccttgtcttattctggttttcgaggggaacacttccaaattttgcccattcaggtatgatgttggctgtggttttgtcatagataactcttactgttctgaggtatattccttcaataccaagtttactgagagtttttaacatgaagaagtattaacttttatcaaaagctttttttgcatctataatcatgtagtttttgtctttatttctgtttatgtgatgaatcatttttattgatttatttatgttcagccaacctatcatccttgggataaagccaactttattatggtggataagctttttgatgtgctgctgagtttggtttgcaagttttttttttttttttttcgagggcttttgcatcaatgttcatcaaggatattggcctgaagttttctttttttgttgtgtttcttccaggttttggtatgaggatgatgctggcctcatagattgatttagggaggaatcccacttcctcaatttttttggagtagtttcagcaaggatggtaccagcccttctttgtacatctggtagaattcagctgtgaatccatctggtcctgggcttgtcgttctgtgtaaaactaggattgcaactcctgctttttttctgttttccatttgcttggtaggtttttctccatccctttattttgattttaaaggtgtcattgcatgtgagatgatctcttaaagacagtgtatcaataggtcttggttctttatccagcttactgctttgtgccttttacttgaggcatttagcttatttacattcaaggtgaatatttatatatgtgcatttattctgtcatcatgatgttaattgattattatgcagacttgtttatgtggttactttataatgtcactggtctgtgtacttaagtgtgtttttatagtggctggtgatgttctttcccttccatatttagtgcttccttcaggagctcttgtaaggcaggtctgatggtaatggattcccttacgttcttttctatactggctattttattctttcctttccatgtttagtgcttccttcaggagctcttgtaaggcatgtctgctggtaatgaattcctttacattattttctatactagctactttgtctgtcagcttctgcattatttttttgtgattcttagcttccttggattggttttcaatgcattgctcctatccatactctgaattcaatttctgtcattacagccatctcagcttggttcagaacccgtggagaggaggtggtggaggtggtgtggtcattggaaggaaagaaggcactatggctctttcagttttcagggttcttgcactggttctttctcatctttttggacttaacgttccttatgttccttcaatctttgaagttgctgacctttggatgcatttttttcttttatcctatttgataattttgaggacataattgtggtataaggtgaattcagccaacttgcttcatttctggaagattctagatagccaacacccagctaccaaactcttggattgcctgctctaattctggggaacttgtatccagcaaatcttgttgtttgtctccttgaggttacgaatccctttgcactgagggagccatggtgctctccaaccactggtccctacattctgatgggtggtaccagtcaaagccttttctagtttggtgacaatggaatacatcctcatttgcatgtgccagcagcagaagcacagtggggtgcatgctggtcagctacagcagggtgttagcaggtgcctgcatgcctgtctccactcaagtgtagactacagtggcagaggaaaggcaacttatgggggcaggggcccctgctggcgattgtatttgcacaagtgttggcaataggggagggcgctgatgggcacaggtctgtgtgcattctctttgtgttttctatgtgccacaggcaggggtggtcactcagggtggggaggtctgctgttccctgtgactagtttcattcccatggcagtgttggcaaaatggccagtgatggtcggtgtaggactggttggctctgggaccaccaaggttctaactgccatggtggtggtagggggtgtggactgcactcttcttgcagcagtagcacggcagggtgcacttacacatatatgctggcaaggtaaagaaagcaaaacccatctgtgcacatatgtgtcagcaaagtgatgtgggtgtttgctgtagacacacaggaagctgtagtgtggggtgggagtgggcaggctggtgtgtggccatggcagctgcacttctggagcgcttaccccctgtcatggaaggccttccagtacagaagctatgatgcaggccctcagggtacctgaggcttccctgcaagcaggtgctgccaggctcgggctctgggagaggccagcaaactaaagggtgctcatgttgggccaaccttgtctgatggtcaagaccaccctgcagagttcaagtccgactgttgccctagaactaaagtctcctatgaaagcatgtcaagcctagagggatggaagtccctgaccgtgctccgctacaaatgttctcgcaccaaactccctgggttctacatccgctggcttgctgcccctaccacttctctaagcagctctggctgccaacctgagtgtccatggcagttgaggggcctcctgcagctggaattccagaggtccgtggttagaacaggttgctccttgcaagttcaactcacccattccctgagagtccttgggggccaggaacaagtcccagcgcatggtagcccagtgcaatgttcctcctgtttcagcccagcttccttctgtgtcttccctcggccactcctggtgccttccatcggatgatttgttaggagtgcgccagttgtctcagtcccttgctggcggtaattccacttgctgtgtctagtcggccatcttgccccaagctaagagtgttaagcagagaaagaaaacagaaatagaaaataaatttcatgagaattggaataaaacatatgactgtaatttttcaaagaaattattgtctaaaaatccaaaggcaggtgtaacttatagaattcttataattaaacgtcaactttgatattggctatagatacaagttaaacttgatgtaaaaaccaagtttatttctatatggaaacaataatatttggaaagtgaaattttagaagaaagacagcatttataaatgtatgaagggattagaattgaacctaatgagatggatatctacagagaaaattataaattatacaaatttcataaataaataaagtcatatcgagtttatgagttgaagacattgcaaagacagcaattgtttctaacacaatcatggattcaatacagtcccaccaaatgcaagcagtatttattgtgaacatttaccaacaaatcctaaaatttacaagaaataaaaaatggtcaggaaaagtcaggaaacatttttaaaagaacaagatggagaatctattctactagaacacatggcttattacatactacaataagcacagaaatgtgatattagcacaatggtaagttaaaaaattgaacagaatagaatctctagaaacagacaggtataaaaggaactaatttataacaaagaagaataatgagtacagggccatttttaaaataaagagctgtgggtcaataggataatggcagccctacctccccttgattatcagggttaattactcttgacaacatgctggctttttttattgcctgttcatctttggcagtgcagtacataacagtatttatgggtcccatcgtcatatctgtaccaccatatctcctttgctgtaaagtgactcttctgttttaaaaaatggtattgatggattaccagatcacatttcaaacattcagtaaatcctttgatattagtgcttacaatgccttgcacagaggaaagaaagatacatgttataatagtgacaaaccaactttccttccaggttgagagtgttgcatgcaccagatttttatgaagtagctggaaattctccttgaaaaattatgccatgtcaaagatctctgtttcttagatatttggtattctgcagcagcattaactagattagcttttgtgggtgggaggttacgctgttaatccatggatattctctatctctaacactatgtccacttcatatatgtactttgtgcctgctatggggtagccaatgacagaacctggataatgagaacttgccaagtcactgcttctgtgtggctttttgggactgactcttctatgatgaatccttgctgtaaacttaaaatgcaatacaaagatctacacaatttgttccaactcacgtagacacacccacgtttcttccacagacctcttttcatgttcttgataatcatctatgttatttctcattacccataagttcattcattcttaccttaggacacttctatttctgcataagttggaataaccaggcatgctgcttgacactctgctttttaggaagattaccccagataatagatatgcagcagggatgcagcaggttcattggagactcatcataacaacaactctctgcaagtgaaggaagcagaactggaataacagaaatgttgaactaagatgcggttacaaagataactacagaaataattgaaattggcatgaaacttcagaatttcccagaaagagaaaatggcatggaattttgaattccagatagattaataaatgggatgcagagtgcccccaagagggggcataaaatgaaagagcaaacttccctgtgcagactgcattttcttgtgaactagtagcactgaagactcctagtacctgggaaaaaggtgcctttaccctgaaggaagaatatgagaagcacaacagagcatccactttgggaagaacattggtgtaaatggagataatgtgaaaggtcaccacataaatgggaatagttttgaagactgctgactttttgaaatagtctttcttaataatttaatcaagaaacgaatgtaaaagcacttcggacattataagcatcacaccaatataaagggctgttattatttaaaaaaaaccttcagggcaatatctatcttgatttaactgatgtactattgaaaagaagctattgtcagcaggcacatgagtcagttaaataatttaaagcttagctatagtggctaatgaaaatgtaagaaagagcaagtatcttctttgcctgcttaaaatgtgtcaatccacctttaagatttttactaaactaggtgtaactacaatttttagattcatcatgatacttgacagcaatgaggaaagattctttttcaaatttttagagcatcttttactactatggtacattgtcacaatgaatgaactataataaataaggttaataaattacaataaataaggttgatgcattattaactgaagtctcttctttattaagattccttagtttttatgaagtgccatttttctgtttaagaatatcattcagaatgccacattacatttaatcatcatgttccttaaactccttttggccatgacagtttctcagacttgttttttatgaccttgacagttttgaacactactggtcagttattttaaataatgtttctcaactggaaattttctgatgtttttatcatgactgttcttggggttatgtgttttcagcagaaaaataacagaggcaaagtgtcattttcataatatatcaagggtacatgtcatcaacataacttatcactgtttacaattatattaaccatctgtctgaggtattgaccgtcaagtataatgatatttgacactgttttctaaactgtaaaacatacttacaatcaaccatatgaccttatgtagcacatcacttaacttttgaaaatcttagatatctatcagtaaaatgggaataaagatgactgcctccaatgttttatgtaataaacaacataaatagtaaatttatagccacttggtatgatcaaaacttacaaaaaatataacgtattactttcgctatttaacatttattgagtgctttgtgggtgaaattcaccattgtattagctatgagtaattatgcaaacaaaacagacatggtacctaacttaaaaattttatgtttaaagggaaagagcatgcacataaatcactatagtataagcaaaggaagaaaaagcaattctgtttataaatttttctctaaaactatacatcaagaagtgtgtgatacattagaaagtaatgtacagagtacctcatttcatctgctcacataccctgtgaaaaaggaggtttttttcaatttaatttttcagcagaaaaaagcagaagtcttgagaaaaaatgctttagattcaggggaaaaatatatctaaaatcatgacaaatgttaatgtgtttctccaatttcaatctgacattgaaaagtctttcttattagttgatcaccatcaggtgaactttcaatttattttctaaagaatagtgggaggagagatatggttgaaaagcaaaatgttttcaaaggtcatgaaaaggggaatgctgacaaaagagaacaggacattctcctagggagtgccttacatgataatttaatttcttaaaacactcagatgaaaaagagatcttttaccctggttttttgcctgcagagactggtaaggccaagctcttccagtaagcaaccaagcatgaaaaataatttaacatattagagttagtgggtgcagcgcaacagcatggcacatgtatacatatgtaactaacctgcacaatgtgcacatgtaccctaaaacttaaagtataattaaaaaaaaaaagaaaaaaaaaatttaacatattagaaactactgtttagtcctatgtttggcaacttatttttctattaacttacgagccctttaaatctagctacttcagcactggagcttattcacaggtaatattataaatattcagtttttgttgaaaatttgaacacctgactgaaattagaagatatttataagtgaataaatgaagaaacgaatatgctgaaacaaaaggacagaaagacaattaactgtaaaacaatttatagctattatgttaaagcacatgattctttacaaagttgattggaattaagagagagataatttatattaaaaatctttctttgtgtttactagataatataatatttctcaaagttaattttgtacacatataatttgaaaatgtattggtttatgttctcctttttgcctgataatccacaatggataaaaagatgatgtcatatttgaacattacatctgaatttctgtcctttccaaggtgtagatacaattgtctctttgatatggaatggagagactcgtatgtaggcattttgagtttacaaagaaattccaaaatttaactgctgttacatcagagagtatttcaatttctgacaaagtctgaacacattggctggccatcatctcccttgctctttagttaaactaatctatgtgctaaaataaaggaaaagagcaaggtgatgagagaaaaatcagtcagtttagtaaagctggtttccctcctacttttttgtactttacattattccttttatgtttataattacacaacataattattttgagggatttatgtacagaaaatatatttttgggaaaaagataatatccataattgtgtatccattaataatagatttaaagagagatacaacaataatgaatatactttgatgaacctgttggatatcagttgactagaagagtcagaaaatagtatcataataaggagaaacattggtactatttttcaaggatttgaagtgatacataaatacggcttctagtacataagatggtgggtcaaaccattctgttttgtagatagcatatagttggaaggtgctttgtttttgttttctattttatcaactgtaatgtttatagcacatatatttaatatgattaaagtatggttggctttaaatttaccagtgtgctgtttttagttttgacccagaaggaacccagtatgcatttttgagctcttttcttgcttgtttctttccacagctctgccttgttatttcctgtagtctcagcctccctaaattctgatatttttttctcctactggaaatctgctagactcaatttaggttttcttcccaagccaatattctggaagatgtctccaagcagaaatatggtgcagctgtgttgacaaatctgtgttgacaaatatttggaatatgaaaacttactggttggtacataaaacatgacactttgggcaactatttatttttttaaagttatacacttaacatataatgttttccttccattcctagacatgtaccccccacaaaaagacagcatatttacacacaaaaacttattttcacatatttataggatttttacttttcactaattccaaactgaaaccaacccatatgcccatccacatgtatatggataaatccaacttgttatatgcgtacaatgtaattctactcagcaatacaaagaaacaaaatactggtcaaccacaacatgaataaatctaggttattttgctaagtgaacctagtcagatacaaagtaacataaatagcagatcttaaatttagtaaaagttaataaaatgtaagcaaatcattagtggttacataggtccaaagtcagtggaaggaatcaactagcaagaggcaaaaggaatctttaggggattatgaccacattctcttatcttaattatgtcggtgactttatgagtatatacatctgtcacaactcttcaaaatgtgtgctttacatggataatatttattaaatttgatttaatgaaacaatgtgtgaggaatagaacacctagattaagttaaattgttgtctaattcattgcttcaatccagaagtgatttttatagagtaatattaatatgttatgagaccttatgtaacaggacttttgcatattacagagacgttattttatctttcacaagcataatacaatcataagactgagggaaattatgtacttatttctttaaaagcttcttcaaagtcaccttacaatattaaaagcaaaaatcaaacatacactataaatctaatcatgaataaatgtcaaacaaagaaatattgagatttgacagcaatttattcttaaatagttcaaggcaaaaatgttatttgtactgtttttttatacacttgaaattatttacaaattttaaagtgagagcaataaagaaaatataaaatcaatcatattggaaataaaaatcatgttaatttttacgatatactattacaattgagatttttgttttgtgaacacataaagcaaaatactgccattatttttgtcagaaaaagtgtagattctgagtataaaacaagagaaataattttttttggaaatgaaaaaacacaatattttttaagcaacagtctaaacaaattatactgaactaccattctaactataaattttcttctaaaagtgtgattcgcaaaagatgaattatattctctttaagcaggaaaaattttatgcaatttctttaggggtttgaaaaacaattactgttttatttcagttgcctttatgattttgtctcttctaatttaatcagttctttcataaaaactatgttttttatgtaatttttgtatttttactactaactcttggttattttcttcccaaacgctgtaaagcatagctcataaaaagtctccttaatagacattggagatatgattgtgttgcgtgatgaatactacttgatgaaaaaaattcactgagttttaattacaattttcaagggtacgataatgtcacccttttttcataaatatttccttctcttttgactttttctcataccttaaaaatctattttatatctctatctatacacatacatacatatatatgtatgtctgtgtgtgtatacacatgtaaaattacagatttttgttatgaactaaatatttatgtcctcccaaaactcatatgttgaagtctaatccccaatgcaatggtgtttagagatgaggactttgggaggtgattaggattacataaggtcatgaaggtagagccttcacaagtaagatttgtgcctttataagagtcatgaaaaagcttatttcccctctttattctttgccatgtgaagatacagtgaggagtcagcagtttgcagcttggaagagagccttcaccaaaacctgatcatcccttgatctttgattttgaggatccagaaatgtgaaaaatctatttctggtttttataagccacacactctatggtacttgattatagcagctggaatttacacaaaaatatgtctttaactaaaagacttcattgttaaacagcaaagatgtatatcaagcagatacatcactgttaggaagagggcctttttggtctggatgggaaatctaagcacactcggcaacaggtggcaggagcacactggaccaacatgcagatccagccttgaaaagtaccaatcgggagaaattgaacaaatcatctaacctctttcattatttgttttgttgacttgttgaatgtgagtaataaatttgaaagcttgtggtgagtactgaagacaacatatgcaaaattgagttgataaactgtaattttcaatatttacattactataaatggagaggaaaagactctaacctactttacccttcaattttcttgtaattatagtactaattagaggatgattgtagctataccccaagctgggtaaaggtcagtgatgcacactcacagtttttgaattgaattcaaccaataaactaaaggagtggagagagcaggctaaaaagcacactctgtagttgggccagcgcactctgttctggaatttcctccatgagtcccatgtttcttcctgcatttatatattttattataacagcacgaatcaacataatcaccccatttaaatgaaaacatctttccaagcaccacgaatttttgacataattattaaagtatacgtgaaaaaggaaggtgaaaacactattacataaataaaagataattgaatattaaaatatcctgcagtaatacagttaaagaatagagattctataagtcagagaagaaaaattcctccaccgaattttttaattcatcctaagtgtcattgatttaagtttgttgatacctaaatttcaatttacttaaaatttatttggaaatttaagacatagtaacatttgcagtttttagcaacttatgttcttattgactacttaaagaagttagtattttagggcgggcacagtggctcatgcctgtaatcccagcagtttgggaggccgaggaaggcagaccacctggggtcaggagtcaaaaacaaacctggccaacatggtgaaaccccgtctctactaaaaatacaaaaattagtcgggtacagtagtgggcgcctgtaatcccagctattcgggaggctggggctggagaatagcgtgaacccgggaggcagaggttgcagtgagccgagatcgtgcacattgcactccagcctgggagacagagtgagactctgtctaaaaaaaaaatatatatatatatatatatagttattttatatttagacaaggaggaagtaaggataaacatggctttaacaatgagaaagtggtcaatgggatgtttttttttgagacggagtctcctgtcgcccaggctggagtgcagtggcgcgatttcgtctcactgtagcctccgcctcccgggttcaagtgattctcctgcctcagcctcctgagtagctaggactacaggcgcctgccaccacacccgctaatttttgtatttttagtagagacagggtttcaccagtttggtcaggctggtcttgaactcctagacctcatgatctgcccacctcagcctcccaaagtgctggggttacaggtgtgagccagccaggatttttaaagatttaaaacattcattgaatctacaattttccaatttaatatatgttttcagtggttattaattatagcataggatatttgaggattttgacttaaaaaatattttagtgcaacaaaatgaaatttagctcttaaaaacaatactgaaaattttcttcttggcatttaaaaaccaagattctggatatccagctgattaggtttaatgtaaaatgcattagtgtgtagtgctgagcatttcagaatgcttttatcaagaggtccaaacaaacgcagtgggtcataatgtcaaatcagtggaataattcatgaaccaactcatcctctgacttactgacacttaccaagctgttgcctttaacccctagcaaacctatcttagaaattagaggtttacaaaggaatatatatatttatttatatatatatacacacacacacacgtatataacagagaaatatatagagaaatcattatttttacatatatgtaaaataaatatatttctatttttacatgtatgtatattctttctagaaaatatatatttaataaacttataattcttgattacatagaaagtaaaaatataatacgtattaagtatatatatttagtaaacttcttatctttgagtacatctcatacattttcttatattcttagttgcatatgaattaattgctgaaactgtttgtttttgaagttgattgaagatggaggtaactcatttttattcgtattttcgaccattgactcttttaggatgcctccctgtcttttcctcctacccctaaatataaatatatagttattttactttcctagggcctcattctaaaccaacatacaaataaatttacaaaggaaaaaataaaatatgtattataacatgcaaagtgatacttgagttcagttattatggtaataaaaacagtaaatttccttataatatcaatttcttaatcctgtaccaatctgatgccaagacacatttcagacaaaaatctaatttttcaatagattacattataactgactaatcagagaataaaggacaagcactgtggacataaatttgtttttctcctttctacatcaagaatacttacatctctttttttaaacaaagaggatcatcagtgataatacctaattacaatattcattttcctatttaagttatagagatatatgcttttcttttctattcttctatagttactattacaaagtaatgaacaacgaaacattgtaatgatatatggaaatttgtaaacattgataccaatgaatctttttattcttcccgacagttgtaacgtatatattatgcttgatactgtagtgccctgagacttctggtaacattctcttttagatatagtagatcatatatgcacactaaatatagtagatcatatctgcatgaaacatgcagcagcttggggtcaataataggcatgcacttctgaaatctaaatgttcatgagtcccataaaccataacctgaaacaagaaaatttgagtacctatgctgcaactactactttcaatattttattaatgatttacaaaaccatgaatacatgctttacattatttaattctgctatttcaaaagtgaatctataacatgtaggaatctacaaaaatcacaatagtattgttgaaaaactaactacttattccaaactccctacccccaccattctgtgatacttttatttttcttgttgaaactctcacattctagaaagtgtggactcagcttagggcctagttaatgctggtgatgaagaagaaattcagtagattttagctaaaataatgtacacgaatatattattaatttatttattaatggtcttataatgattataatagtgattgctcaccagatcaccaaatatgaagtattattgtctaatataaatgttaattttaaaatatataatatgtatttgtataaatattttcaatacagttattgagtacatggcagcattttttaaatgtaaagaataataaaactaaaaaatgatatatgaaaatttatctcttcaggaaaatgcaaaaaacaataaatatgtttagacattattgtatgtcttagtttatgccgttatagaaaaaatccatagaatgggtggcttcacccaggtaaattcatttctaatagttctgaaggctgggaagtcaaaggtcaaagtgacagtaagtctgttgtctaatgaggacactcttcctgattttcagatagccctcttttcatattatactcacatggcagaaagcagagatttacagcaagctctcaggtctcttcttatgtagacactaatctaattcctgagagctccaccttcacaacttaaatacctccctaagtccacacctcctaatatcatcacatcaggaatcaggactttaacatatgaattttgagggacacagacattgcccataacactacatccctggctgcccaaaatgtatatccctgcatgccaaatacatttattttaccctaataatctccaaagtcttaattcattccaatatcagctataaagggtaaagtccaaggtcttattggaacgtcatctaaattaggtagagataatacttgaagtgagattcattctaaggcaaaattctctgcagctgtgagcctgtgaaaccaaacaagttatctgcttcaaaaatataattataggacaggcatagagaagacatttccatttttaaagggggaaatagggaaaaaggaagggacgatctgtcccaagcaattctaaaatgtagcaaggaaaacttcatgagttcttaaggcttgagaacaatctcctttggcctgatattttgcctttcatacccactggggtagtactgttatccccacagctcagtgccccatgctgtggcaatctgtagcggccccacccatgctgaggctctaatgggtaggaggtcatgctccagagatgtgcagggtggctttgcctccgcaatttctttaggaagacttctgccctgttgaaagttagacagtgtccctgatggtctctgaatcactttcagtgattcttcttcccttttcttgaagaacagcacacatttcttgaagaagagcacacatttacagtcttgcttcattacatctcattttccgtgtttcctttagtcctagtgttttcctggaatcatgctatctctattctgggcttctattgagagagctgggaatttctggtttacccccacactaatctccttatcaaatggttggtttgccacaccattactgttctcctccaaacaaacactcattcacattatgtgtgtgtatatatatacacacatatacacatatatacacacgtgtatatgtatatatgctttgaatgttttaaatatttaagtcctgggtttttttggcttaacaatttcttttccaattcatttatctcttttttcattttattgtaaacattcaggtgaaatgaaaccattccgtaaacattttggttagaaatgctttgagttaaatattcaatatcacaagttatacattctaccttccacaaaacattactacacaaacacagttcagccaagttctttggcactttatatcacagattatccgtctgctttctaaaaacatctcgcttattcccatttgatacctcattagaatgacccttataactcatatttctattaacattctgttcatgattacttacgtgttttctaaggagatgaacactttctcgacaactccactcttccctttctgagctctaaccagaattgcctttagaaaggtccttcacggcagtattagcttcttttagcacttactcaaaacccttccaatttctatccataacctagttccaaagctacatttatgtttttaggtatttcttatagaaccattccactctcggtactaatttctctcttagtcattcagtccataacattatctgaatataaaactaatatactcaatttaagatgctggacaaatggagtaatatagtcttataaactgaaatttttctctcataaatatgagttaaatactcaaatatttaagtatgttgaacattaaaaaattaaatgtatttttggtagatcacactgtgattaagaataattcaatatatgagaaaaataatgttaaagtaactataaatcccatccttcaggtctaaatcatcatgagcattagacaaaattcatttctaacattttctatacctattacagatagaatcattgataggataagaaaaagaaagaaaagttttacttaaaatagattactactttgtgtgatgttttccaatctagttattatatttcttagatcctagaagaagaaatggaagtgtatgcaaagtaagtatttttaataatgtttaattactgaatagttattaatgacattaaaaaccccacaacactatgagtgaatagaaacaaatatgaaaaacttaacacgttaagcaaattaaatactggtactttcactcttagcttcatgtaaacttatgtttctcattactccaattaacagtgctcttaaaacaatgaaatttataatgatagtgcctctggaattcgtgtgggtgaaagaaacattggttttagagtgagataattatgagttctaaactgtctccaacactctctatcgtccatggactattttaaatacttcaaccatagtttacttattttgtttctgacataggataatgaattacaaacacattttttttcccttttaagagttacaaaaataacaatctattatttctttgtaaaaataactgaatgagtgtctctccagggaggtacatcctgagacttagaacaagaggactcacttgaatacaggcatcataaattatgattttcttaatgaaaattgactcacagaatcattatatgtgaaatatgcatcattatttaatgaattattattctaactacctttgaaatatttaataactatttttaagttttgagcagtaaaatttgaattcaatcagtatatcaagaatttataattagcatatgacaagaaaagaaagcccttctagaataaattagatgaatacaaaataaacaattttaaaataaggtataagacgtcatgtaagctttccaaaataaacacagagatacatcattctgtagggaaccagagtttcttcagaaacagatttcacaccattaacgttttcaggaacaacaggcaacttgatgagatggtgtcccaaaatgacatattgaataacaattgaaagcaatttaaataatcactgaattttttgatgatataacatatatttcataattatctgttatttatccaagaagataaaaaggaaaaattcaataaagaatctttatgaaggatagaatccaacccaatattgagaaattcattacctaaatgactaatttttaataggctgcagtttttattttatgttttccttgtaatagattagaagtaaatatttttatattaacaaaatgtattgctaaaaacagtacatgcaaatatcagcttaacaaatactgaaccataaaaaccatttggtttatagttttatgtattctgacaaagaaaataaaatctcatccgatacagagcatcccatcaggagtggaaaatactaagaacaaatttctaattcagtgaatcattgccttgtatttttgaaagaaatggtcttaaaaatgtgaagaataagcagcaatatttagagggtacagcctttgggcaaaaagcaatctgcttagaaacagaaggtatccttttacacatggtacggaaaggaaagaaggaagcaaaacgtgaaaattaagggatcgaaaacatgataaaaatgcaagcaaaccaacccccaatactagcaaataatgactgtacacttcaatttagcaaaaaaagaaaaagataaatatgttatatgatcaaaacatataccttacccaaaataatgacaaaaattaaaaaaataaacaaggactataattgaatgcaaaacaaatagcaatggatataaatttaacattcataacagaaccaatgaagacaaaaagataaatcgatttaagcaacttctggatatagtgctctgactattcccttggaagattgcatcagaggaaaaaataaactgctgagttatcttgaatcttaactagtagaattgttaataattttgtttagaactggaatatcatgagtttttacaagctcataaattatatatgtgtatgtagacatatatttgcatatattatatataaatacacatgtaactacatgtatgtataatatgttataaaacatgactgaaaaatattttattagaaattagtaatgattcaaaaggcaatctgagaaatttaaaaagcacggttgagatttaaaattcattatgctctagcttttgaagttctccaacacaaaaccgaaaccctgaaatttaaagtgactgggctttagttgcccaacttagtggctgtgttgaggtttcattttttgtgtttcttctggctgcttcacagcgaagatttaagatttaaactcacaagctatgagaaaattaaaatctttttgttgtttttttcgaaacagggtcttgctctgtcaccagactgaagtgcagtggttcaatcacaactcattgcagccttgacccccgaggggcagatgatcctcccatctcagcctcctggggtagctgaaactacaggcgtgcacccccacacccaggtaattttttgtagagatggagttttgccatgttgtccagtctgatctggaactcctgggctcaagcaatctgctcaccttgggcctcccaaagtgttgagaatataggtgtaaaccactgcacccagccagaagattaaaatcttaagaaagtaatcagaatgttacagaatcaaagtcattccctttaatcttttctgagattgggctgttgtataattgttaataaattctactcctacaaattgattaaaattttcatttttaagatgtagggatagaatatttactctccaatagaacacagtaaaagttattcattcctaagagaaatagaaaaaaattgaatatgggcaggcaacattattttactatacaaaataaactggtttgaaacaagtattttgatgagaggttttgtggagcaagcaacattatttgcttttaaaaaatgcctattcatggtttcatctacttactgcttttagaattgttaatttggcattgtgataagacaagctgtgagattcaccacatttaatattaaatgccaaaaagaaaaagaatgattgtgcggtggatttgaaactgaggaacatgagcattaattacaaaatgttgaaaatatttcattgcacatttcattggctacattgtgcttcttagctgtagaagccataaaaacttacttatgctcttatttctaaaagaattgtaaatataatcatatttaaaaaatttaaacagaattgtgtagtcattattatgtagttttaaagtacatatgattattaagttagagtagatacattgtaaaaggcatccaaattggaaaagaggaagccaaattgtctctctttgcagatgacataatcttatacatagaaaaaactgaggacttcaccagaaaacttagaactcataaactcagtaaagttacataatacaaaattaacatataaaagtcagtagtatttctgtaaaacaaataacaaactagctgaaaaagaaatcaagaaaacagtcctatttaccatggctacatatattaaatagttaggaataaatttaaccatagacatgaaagacttctgcaataaaaactacaaaatgctaatgaaagaaattgaaaaggacacagacaaatagaaggacatctcatgctcatgcactggaagaattaatattcctaaaacgtccatactactcaaagcaaactatagatgcaatgcaatccctatcagaataccaaagacatgcttcacagaaacagaaaaaaaaaaatcctaaaatttatttgcaccacaaaacaacctgaaaagcctaaccaatcctgggcaaaaagaacaaaacttaggtatcacaccacctgacttcaaaatatactgcaaggctacaataaacaaatcagtataataccggcataaaaacagacacatagatcaatgggacagactggataaccataaataaatccacatattcatggtcaactgatttttgacaaagttgcttaaaatacatattagggataggacaccctctttagtaaatccttctgggaaaactggatatccagatacagaagtattaaaatgaatctctatctctcacaatataaaaaaatcaactgaaaatggattaaagacttaaatgttaaatcccaaaactataaaaatactagaagaaaacatgggggcaatgctttaggacactgatgttggcaaaggttttaagtttaagagcctaaaagcacaggcaacaacaacaaaataaacaaacaattctattaaactacaaatcttctgcgtagcacagaaaacaattaacaaagtgaagagataacctgtagaatcatagaacatatttgtaaactatttatttgcatatatggaaacataacaaatatctgtataaaggtactaatattcagaatatgtaagaactcaagacaactcaagagaaaaaaaacagatattgcattaaaaagtggacaaaagatctgaatagaatttctcaaatgaaaatatacaaattgacaataggaatataaaaaaacttaatatcaatactcagcacggaaatgaaaatgaaaacaaacacaatataacacaccagttagaatggttatatcaaaaacacaaaaaaataacaaatgctagcaatgatgaggagaaagggaaactgttatatattattgatgggaatgtaaacttgtacagtcatttggaaaacagtgtggaggtttctcaaaaactaaaaatagaactacaatatgatatagaaattccactattgggtagtgatccaaaggaaaggaaatccgcataacaaacagataactgtatcttatgtttatggcagcactgttcacactggtcaaaatatagaatcaacctaggtgtccctcagttaagaaaatgtggtatatatacataatgtaatattattcagtcacagaaaagcatgaaattctgttatttgcagcaacatagatgaaactggaagtccttatgctaaatgaaataagtgaggtaaagaaagacaaacttcgcatattcttaatcttatgtgggaaccaaaatagttgacctcatataggcagagagtagaatgatgtttaccagagtctgggaagtatagaagataggggtttgtttccatcaaaaagtgggcgaaggatatgcacagacacttctcaaaagaagacatttacgcacccaacaaacatatgaaaaaaagctcaccatcactggtcattagagaaatgcaaatcaaaaccacaatgagataccatctcacgccagttagaatggcaatcattaaaaagtcaggaaacaacagatgctggagaggatgaggagaaataggaatgtttttacactgttggtgggagtataaattagttcaaccattgtggaaatcagtgtggcaattcctcaagtttctagaaccagaaataccatttgaccctgcaatcccattactggttatatatccaaaggattataaatcattctcctatgaagacacatgcacatgtatgtttattgtggcactgttcacaatagcaaagacttggaatcaacccaaacgcccatcaatgatagactggataaagaaaatgtagcacatatacaccatggaatactatgcagccataaaaaaggatgagttcatgtcctttgcagggacatggatgaagctggaaaccatcattctcagcaaagtatcacgagaacaggaaaccaaacatcgcatgttctcactcataagtaggagttgaacaatgagaacacatggacacagggaggggaacatcacacaccagggcctgtcagagggtgggaggcaaggggagggatagcattaggagaaacacctaatgcagatgatgggttgatgggtgcatcaaaccaccatggcacgtgtatacctatgtaacaaacctgcacgttctgcacatataccccagaacttaaagtatcataaaacaataaataattaaataaataaataaataagataggggttggctaatggatgtaatcatagttcgaaggaataaattctagtgttcaatggcacagtagggtgactatagttaacaataatttattttgttttatttatttatttttctttaacttttaagttcaggggtatccacgtaggttgtgcagttttgctatataagtaaacatgtgccatggtggtttgctgcacagatcaaaatagctggagcaggaaatttgaaacgctcccaacagaaagaaaagataaacgcttgcggtgatgaatttgctaaataccctgaattgatcattatacatcgtatacatatattagattatcacatgtaccacataaatatgtataactattatgtatcatccaacatgaaaaaaagaagatacgatgtcacaaaacatattatgaatgcgccttatttacccaaatataactatattattttaaatgtgaataacagaaaaaaaaaagcaaacttgcaacccaaatctacttttgttatctttcacagtaagctctaacagaattttaataccttcatatgaataaggaaaaagaaatatagacttgggaaattgataaatggattattaatttagaatgaaaacaacaaatctgcttggatgatgaagcaaaagatgcttatgaagtattgggataatgtgtaatattctcattttagttagactgttcctgataccagttcaattgaacttaaaatccagttcacatctctttatccttcctatcagtacactacaggtagcttagctcagaaatactagacattttaacaaataccagacagttaattttagttgctgattactgaaaactgttctagaaaactgcatatcattcaaccttttgaactaggttactacagcacaggaattaaccacaaaatattgttgaagttttacaaaaataaactgcaaagtctagtactatatacaccgactattttaagttttcatgctatttaaaggccaagaaggagctaaaagtcactttttgttactgatgttccacaatgtggcaaaagccatgaatcagaacagggagcaaaaattcagctaaatattaggaagaagagtttctcctacctcttttttgggtcattatcctttctttactttcatgatataatgcattcttgattttcctctgaattctctggcggataattctttcatgtcgacactttcttctatatgtcacatctgaatattggaattccttctgagcttcttttctctttccctttagtaattaatacatttccatgcctttaaattatatgtaaatactggatatttacatattgacatttggacatcttacagctatcttaaatttagcactctcaaatcaaactctcaaaccagttccaaaactggtcctgtctaagcctccaaaaatgaaaccacattccccctgttagagatcaaacagcatctttacatatcttcttaattttattcctggtccttcatatctgttgtatatgtcatgtatagatatccttaaaacattaactgggccatgccactatggtaaagaaaaatctttaaactttccattgatttcaaataaactccaacctcctcactatgatctagaagctatgtttgatctgagccctttgtaccttttcaaacatgcattgctccactgtctcttggtctcatgacattttaagcccagcagccttctttgactttctaaaacactgacagctatcctggtcagagttgttacctatgccttttcttctgcctggaaaatttccacaggtcttggcaatgctgatttgtttaccctttgggttcacagttaaatgttaccatgtcagagaaatttccttttaaattgcaccaattcaaaagccaccattatactttacctttgtaatctacttgtattctattaaggaacttattacattttattgtctgccttcctaattctaagctccatgaggattagcagaactgctgactccctagtaaaattccagtacttagaacagtttctcatgcactgttatggacataacaaatgtctgtaaaattctcacaattattgtggacatttgttaatttttaacttttgttattgtggacatttgttaatttttaacttttgttcaacattatccaaccccaaatctttaacaatatattcatttcttatttgtattttcttttctttcctttcttttcttttttttctttctttccttttttttttagaaactacctctgttctattagatagtgtctcaagggactgtaaatcagaagatctttactccttgtagccaaggggtagacacataatagaagttagggcaatcaaatgctccctttctggcgtttatatcttcagcaaaatcacaaacagaaaataatatattcactttccttggtaacattcttatgaaattgcttagtacttcctccttcacaggttactgtaattaccctggtttctcttcacatcctggtggttttatcctttgaatttttttgatcgttgcaatgtcctgcacttaccttcctttgtggattttattaatctgatcagttgatatttttttacttataacagaaaacccaatgaaagtggctttaccagaaagaaacatttattctctcactttaaatatggttctaagataatgaagctccagatttaatttagtggctcagtgctaccatcaaagaccaaagtaatttctgtttctcttctgccgtcatcatgttatttagctctccttgaggttacaagatatatgcagcaacaacagatattatatcttcatgcacaaaattacaaaaatatatgaaatttatattttatatttcaagagcaaggaaacctttctccaaattcccatgactacagtaattgaatttctctcacattttatcagccaatattgggtcacccattcttttcttagtctgttttctcactaagaacccactctaacaataacagcattaacccatttacaaggatggagtcctcatgacctaattactggttaaaggttctgctttttaatattgttacaatggcaattcaatttcaatatgaatattggaacagacattcaaaccatagcagtttctaagtctgtcaattcacgagaaaataactaatttgatttacttaaaataacccaactgtagttcaacaaaattgttcattagggttcaggaagaatgtgaagagattaaaaataaactttttggaaaaaaaaaatctccccatagattttaaaacacagctcctttccaaggttttgtaactcagtcaacataaatggaacttctcagtttaccggggttgacagcattgaatcgtggtacataatactgaaataccatggataaatcaggtgatataattactagttccaattttttaaatcaaatgcatgacatttgatgagttatttaatcctttggttgtttcagtgttctgatttggaaaataagatggcactagaaattttgtcagtatccgttcacttacaaaattatctaaatatagagctcaatcctgtactaaactatgtactggtccttgtactggtccatttgtaatttttaattgattttctcatttattctgtcttggctctcaacattaaattcaattaaaatctaaaatccttgtgtccattcatagccatggattacatggtgacttattccagctcattctttttgtaattgaaaaaaactgtatataggaaaaagagccaaatagataaaagggctttatcaacacacggctactgcaaaattagtgtttagaaaacagaaaatctaaaaaccactgacatgctaaacctagagaagatttctttattctgaaaggcaacatatattgctcttatttattccctactaaaaaaaaataaggtgttttttacaactttggaagatgaattgatagaaaaaaaaagcatgttacttatttacaaggatatttctccatgaactgcctttcaggaagctttctctaatcattcaaatagactttattctctgactatgtctcatgcctgatttgaagtcttgttacagatctttgaaattaaagattgaggtttatccctattttgattaatacaatcatgttaaataatttggactatgttgcacaattttttgagttaggacatgaataaatactaaataaggtaattaagatgatttggtactttccagaattaatgattcttgctttgctttgtctcaatgtgaaagctctttgaagctgtgttcacatttgttgtaaggttcaatttttaatccacataatcaccctcaaggttttgattaataaagttaaaaatgtatcaaaacaacgtaactaactgtactttcacaggtttacaattaagtaagaaagaaaattgaaataggattttaaaaagtatctgctggttgaacaatcatcttgaacagagaagaagataaagaaaatgcaccagggaaagttttggggatgcttgtcattattagatgtagggagttatgcaaatggattatatgaatgcaaatggggtttcaatgaaaagcagaagatttgacagattaatttataaaaatcactaatacttttaacttcataagcatttatggctgaaacatcacaacagccttatgagttcatgttgctctaaaggacaaggttgcccatccagtgaataaatgatgaaacagaaatttgcaccatttttgcctgaatttcatgcctactcaacctttaattggtgcactaaactgtttcatgagaacattaagaaggcaaaacaggagacttcctgaaagaggaaggcatttgtaaaatatttgtatagtactgaatagtctactctcttgggcttccatgtcaccccttgactttaacttgtcacagttatcaagaaagactcatgttgtcaaaattatgttgtagaaataaagaatcctgttggagaacaggtgaaatgtgatgtcctaaaagtcaaccaaagagtgcatttatttaaaaagtcattgacaatagacatagacaaaaattagactggatgatcactgcaaaagactattggatgagtaattagaagatcattggttactttcagcacagcgttttgagatagtattagtggagacataaacaagttttatgaaataattaaagagaaaatctagaaagagaataaaacctagtttaaatgaaagtatttatgccagttaagtttttgaattaataatattattccaagaaagaataattgcaaattgaataacacgagatgcacaaaacatgaaattgggttaagaaggacataggaacagtatgtagataacatgcgattcttgaggagtatggatgaaacaattccactatacatgtagaagagaatataactggtgggaattcaaaaaaattaaatgagaagaaagaaaaattgaaaaaaaaacttctataagatgaaatcagacttcacagtaaagtggttgtatagtcattagccacttgaaggagaagggagtgtgagtgtattttgaacagtatagaggtctgaaatagttatgtggagcagtcaagaaccaaccaaagaaaagcatttttaagcagttttaacaatcagcttgatatagggacttaccaggttctcgaaaaataatgctagatttctcttaatttcaatgtaaatcgtggaaatttaactctataaaattgtagagaaaaaaaggaatatacaatgtgattaggactcatctgggcagccccctctagagagcttaatacaaaaatatttccagatgacaaagaaagcttttattccatttatcctgctgattgaaaaatgaatacattaatgctggctttaaaggcagtcatggtctaccccaaaatatttcacttgccttggttcacagtggacccttctaggtgacccaaaagctagagtcaacatgaactacttgagatggcctaaaatgctccaaattagcaaacacttattcctgccattcacatcatcgaaaatcctcttcctacacaatacacccatgaaacagcaattaatctttcaagaactaccttagacaagcctctttttttgaagctttgttgatttactaaacagatataatttctcttttgtatattcacttcacttttttcttcatttatggtaattgtcattctaaaccctggggtttagtgatctatggctctgtttctctccacctcctaacctattccatgttgctaaacaatgagcaatgaagtatcttgattacctctgaatactaaataaatactttctgaattattttctctacataactcaacattcttctaatttgttgaaaaattagaactaacactaatttgtttctcatttattttctatctccgtgaactttttattctgtttactcatttgatttcttaatgaatatattaaacatgaagaaaaaaatgcatgttctatggtggtaatgtctttttccaaatgctaataaaatttgtttaaatgctcttatcaactttttaatggttttcccaaaagtttttaatttaggtaaccaagctttaattggaattagaagtattttacatatattttctgaattaccttgtatttaacaaatattaaagtaaaactattgaaaatagtttatggatagaaatcttagaaggttggcacctttttattaacttcccagatattttttaaagtagattaaaaaggttgctatgtaacatgaaaaaaaaaactaccgtctaaaatctaatgatgatgcagcaagattctaaatcaacaatctgcagtctcacattataccaatgccatattgtaaattacctcttaaggccagagaaaaagtatttcacaacttctcaaaatcaaatacgttaactgtattcagatgttagtttttcaaagaatcaagaggtaagcatcagaatgtgatttttaaacatttccaatacttcttaacaaaaattttctctaacttttttaaagtcatgcacacctaagaaatttttttttctggtttggaacatcatattataaaggtgttcatatattcaaagctagattgtgttatcatgttatactttttcactattttaaataagaaatattatcaattacatgtgcctatcacagtattttattctgttttctgatggtctttttttccttaactctcacttggcttgtttgtataggaagcagaagaaaatatcagagggccgggcatggtggatcacgcctgtaatcccagcactttgggaggccaaggtgagtggatcacgaggtcaggagatcaagaccatcctggctaacatggtgaaaccccatctctactaaaaatacaaaaaattagccagacatggtggcacgtgcttgtagtccctgctacttgggaggctgaggcaggagaatcacttgaacccaggaggcggaggttgcagtgagctgagatggtgccactgcactccagtctggcaacagagtgagaccctgtctcaaaaaaaagaaaaaagaaaaaaaggaaaatattagaacgtctttgagacaaattatgtttcataataattttagtccttgcttctaaagagcctaaaatatttggaagagtgtgtcatgttttgtaagaaagcttgattgtgattactgaaactccctttattttatttttaggggtctgcaaaactttaattcacactttattattaggttatcttatcagcaatgctcagatcttaatgttggcagcatctttctttagtattgacactaagacatgaagaattgctagaccaatctgtacagcaagcatgcttttcacatgttccacttggtctttctggtcaaagatgagacaacagacaacttgtaaatcaagaataggaattaaatgcatacttcattatgtagtgaggctccactggaaagtaaaagagaactcactagtttcatataaatgtggcatgggtagaaaataatcggttgaaacaaaagacttacatttatgtttcatttgtctattttttgttccttaaagcttactttcatttatttatttatttattatactttaagttctgggatacacatgcagaacatgcaggcttgttacacaggtatacacgtgacatggtggtttgctgcacctatcaacctgtcatctatatttggtatttctcctaacgctatccctccacttgccccccaccccccgacaggccccagtgtgtgatgttcccctccccttgtccatgtgttctcatttttcagatagacttaacaacagacacagagggattttagtgaggataaaaaataaaacaaaacagtgctctgtaaatatcagaatgaaataaaatggtatcttcttataacacacaaagtatcagtagagaatatactttccattattgaattaaatagttaaatgtttaacaggatctgtaagttttatattttcaaaaaggtctaggaaagttggtaatcaaggatccactaaatggatcctggttttttgtaacctgttccattttcgggatttcttttcccacacatacctattgtacaatcttagacgctaatagacttatgctcagatatttttgattatttccttgtaataatgaaagagcaatactttctcatatcagtattcatggaatcatcgattcatttatttagtcattaatttttttgtttgataaatgtttactctagaccagaaactgggatgagccttaggaaatgtgcagagatgaacaaagcctgtgaagtaatcagggttctttttactgtatcaatatttactccattagaaataagggggtttgagaaaggagtgagaacagggttcaagtcgagtatttttcactgagtgactctgaggaaccctcctgcgatctttactatttgatttgtaacctgtttaaattctactgaaaacttaaaattcagtaaatgcagttcctgaagtatatagcaatcattttgaaatgtgtagtctcttcctaccataaacagttattagaagacagtgttttatactagcattccatgacaagtgtctttatcagtcataatgattgtgattaccaatcctaaagttagatggacaatgattgtatattggattatctattttactaaaatagaatttaacctcctctccattgggcctacgaaaaagtaaatgttaaccatttggggtttctcaccacaacacagctttgtgaaacaagttcctatcaattgtcaaagcttcaaagtacttcaaaatatcgattacatctgcaggtaaattcaggcatgggctgagaggatttgaggtaaattagcaatagtattggttgcatgaaagtgtggcttgaataaaaaaattctatattagctgtgtggatgatataagtatattcactattaatatttttatatatggtaaaatgaccacaactaaggttaatatttgttcactttttaatgaaaatatatctatatgtttctattaaaatcaataattattttttaaaaaatagtttatccctttatataaaatgattaggaagacctaaccacccttaacatcaaagtgagtaatatctgaacaaccttataatgctatacttgctaaaatatcctcggcatttgattgaatgcagagtctttcacactgatttttttattataaggttaatacatcaattattaactgatatttaacattgctaagagaatagtatacaaaagcaaaaataaaagggtaaattggcttaaacatatttcttaaatttaatgaagcatattcaatattttaaaaataattataatcatatagcaagaagctataagccatttttcatgattgacattttactgagtttcttattaatttgaaaactattttgataatgtcatgaatttattctccatgttttaacattcatatgttaatactgtacacatttatagttgcagaagtgtttatttataggtattgaaaattagaaaattaattttctgtatttttttatattccaggtcagttattatgcaaaatgaaaaggtaatagtgttgctctcctcaggttgaaagcacacaatatgcattcttttttgtaagatatattgattaatgaaacaaagataaatttgtcacccatgtaaaaacaattgatttcaccgaactagaaatctgaaatcgcacatggatacactaaataattctaatgtaattattcctagtatacttaaacagctaaaaaacaaacaaagatttcaactttttgctggaaaaaaacgttttttaagtctagggtttatttataatgcagttataggtaatgcaaaatggatgacattcacctcccagccaaggctaaacatgcagtagtaaaagactgattttatcttaaaactaattagaaatgatctcatcaaaatcattcttgcctttttatttttaatctccgagctggtattaccctttaatcaaattgacaatactagaggctataatgaagatgaaagtgacacatttttaaatttttaatgttacttttttcttttaattttataattaggtcttatctttgaaagtgataaatttgctttatatttaagaagctaataaagactgtagggaaaaatgttatcatgatttatatagattttctagtagtttacatgagagaataatattcatgtttaatgtaaaaatgaaatttaatatcaaagtgatctataggtacatttcaaataacaaaagtaaaaattaaataaaggttaattgagtatgaagtacgtttataacttcttttaattattctctctttcattgaaaaaatgctaagcacctatcagattttatgtatctttttttgaaattatacctataataggaatgagacaaagtcacagctcttttacaagttgtccattctggtgaactgagacaatactaaacaaacaaatcttaagactgacagaaaattaaaatagagagaggtgatagagtcatagtggatacttttaattagcagttgaacaagctgtcatgaacatcttcagggtaaaaagaaaagacgcaatgaaaagctatgcattctgcagatttatatttacaactaaaacactaaagcagaaactagattgccactttccatggtgctcttatactggtagatagggcagagcatgcagtgtttaatccaaatttgcattttatgccaggtataaagaaatgccatcaacacgttttagacaacagagtaacacaatcagaaccagctcatgctggtcgctgtataaagaggggactttagagcaataaaatttaaaaagggataaatattaagagattattacaacagttttcctgacacacgcttaatttcagattaaagcaggagaaatgaaaagtagtggatagatttaccatgtatttttttgctgacattattaaggtattggtaaattagctttaggagtaaaagaaaaacggcttgtaggtttttgtttttagggagaatttaaaatttttttgctttgccttattttgttttcagtgcaagttggagatgcaccttagattgccaaaaggagataacaatcatgaatataataggaataagttatgatagaaagagcaattggtggacggatggtaaagagaaagcaacatttttacatcctaaaaaggcgtctcagtatttcgattaagaatgttttaaactttactgatgtgtaatatatatttggaaaagtttgcatgttatcaggaatatgttttcataaattaagctctcttttccagcatacaaatcaagagacggaacattacaagggcccccaaagttcctttgctgttcctttccagtacttacctctcctagctctagggttagaaattatcttaacttctcacagcataagatagttttgcctgtgtttaaactttatacggcaggaatcacactctatcctttttttgcgtcttattttactcaacattatgttaaaaaatttatctgcattgtgttgtaacttgtctacccagagtttaaagtaaaatgcataattgtttacaagagcagaattttctttttataaagacatggatttgaatgtaagtcaataatagaaaatatgaatattgagttaaaattaagtaattttttaaaagtttctgaaagctgcttacatttcctacttttctttcatgtatattttaccacatgtccacttatactccccaaattttcaactgtaacaaccaaaatgtgtattattcagtagatatacctattacaaaaaaatcaaagaaataaatttatgaagatgaaacagataattacatacatatattttacagttaatttaattatattaaatgtgtaaaagaatataattctaagacttattaaacccatctttgaaggtttttgtgaaggtttggtcactttctgcatcagttatcacatgtggcaactccatgtctatcttcatattttagcctgtgaggaaccatttgaaattacatttctttttttctgttcattcttacagaaacattttgatggaattaacacatcattttcacactgaaacatccaatgagttcacttcgcccactgcccagataaagctaatttatcaagccaggggaattggaatagagaaagagttttacacacctagagctggctaaattggagaacagagctttattgttactcaaatctgcctctcccaaaatttggaggctagggtttttcatgaaaagttttgtggcaggaggctagggaattggcgctgcttattggtgggaaaatgcaaccataggggagtggaaaagggtccttgtgtgctgattctacttctgggtaggggccacagggctggttgagtcaaaagttgtgggttttagatagggttatcagtcttcagaaatgcgaaagcctgagaagacatctcaaaaggctaatcttaggttctacaatagtgatgttatctgcaggagaaattgagaaagttgcctaatcttgtgacctccaggaataaggtctggtaattgtttacatctactccttagcagaattcaggctcttctctagacctggtggacttcctttcattttacaaagatggtttagtttgggggaaaggctgttatcatttaaactataaactagacttctcctaaagttagcttggcccaaggtcaggaatgacaaagggctgtttggaggttaaaggaaagatgggatttggtctgatcagatcaatttcactgtcataattttctcattgttataatttttgcaaaggcaatttcaatgttcataaatataaagattggtttattaatatgtacatgatgttaattattatgtctataattatttctttagcatatatgtgtctggttcttcacatagtttattttttaaaattaattcaaagatcttaagtgatgtgttctatgctgattatacagaagagactagccctgctacagctaaagcaataaatttagtcataacctgtttctgttacctgcctacttggctgcctatgggacatcctgaactaagtatggaaaaaaacaaaatttttacccataaaaatatggatatattctaaaaatgtagaaccctgaaaatggtaaccacatggatatatatgtttatataaccatatacatgttattttcttattcatcaaatctctttaaaatataattagttgttttaattagctgttttaaaagcaataatagtaagaatataatgtggagtaaataacatacattgatacataagtaaaatgtaagataatgaaggcataaaaaggccagaagagaagaaattaaaggacttattttctatgtgaaatggtttagtgtcaattaaaggcagaccatgacaagttataagcatgtcataaaccctaaaacaagcactgaaataacaaaataaagagttatagctaataaagcaagagagaaacatatatttaaatttgttcctttctacttatcctagtttgtctatctctgtcttatccactcctttgtctatctctgtctaacaacctctaacccaaaactctccaaagcttttgtcagaggcggtcaaaccagagtgactccgtcttgaataggggctgggtaaaataaggctgagacctattaggcttcatttccaggaggttagccattctaaatcacaggatgaaatagaaggttggcacaaggtacagattacaaaggccttgctgataaaaggatgtgttaaaagaactggcagaaacccaccaaaaccaagatggcaacaatagtgacctctggtcatcctcactgctctttatatgtcaattataatgcattaacatgctaaaggacactcccaccagtgccattacagtttacaatgccatggcaacatcaagaagttaccctatatgttctagaaaggggaggatccatcaattccaggaatattccatccttttcccagaaaactcatgaataatccaccctttgtttagcatgtaatcaagaagtaattataagtacaatcagtggagcagcccatgtcactgttctgcctatggagtagccattcttttgtttctttactttcttaatgaacttgctttcacattagtctatggacttgccctgaattctttctttcttgcacgaggttcaagaaacctctcctggggtctagatagggacccctttccagtaacactcaatgagcagtggctcattatatgctaattataatacattaacagacattcccaccagcaccatgacagtttacaaatgccatggcaatgtttggaagtcaccctatgtagtctgaagaggagaggagccctcagttccaggaaatctctgccccttccccagaagactcttgtttaacatataatcaagaaataactctgcctatgtagtagccatttttttgtttctttacttctctaataaatttgctttcactttactctatggacttgccctgatttctttcctgagtgaggtccaagaaccgtctcttggggtctggatcagtgagacagccaattataaagggttcccagagaacctctgactgctctgcaagctagttgcaatgaacactggggtggaagctggcccctcatcttcctgggtggaacctgagattcaatttgtgtggtgggaaacctatattagcagaactctcgctctgcttgagagtccctgtttcctttttatttttcctttttgcccaagaaattcatttttctcacccttcaaattgcctgcaagcctaatttttcatggtcctatgacaaggattctgtctttagctaaactaagaaaaagtcctacaacatcttgacccctttctgctagcactgtcagctaggtttttaatatgtgaaacttattttaagtttcaaagtcggggctgaaggaaattaaaatattttacctcaaaatatatttctttgacatatttaaaaacggtttacatttggctaccagacagaagtagccttatcttaagtggggaacatttgcatctgtagagaatctctgttaagacagccatgccacctccactttctatacctttctccaatccaagagcaattgagagtctgccagttttaaaaggctgaaaagaaacactgaccatctattctttctaagcaagtctttattcacataacaaagctgcctacaaaggccgtaacaaagttgctagctaagcttcttctcccctttccaaaacatgttttatcagagcctaaaccctcattctttctgtaatctcaatatgattataaatttctgtaacagtaggaagttgagtgttcattctgaaggctcccgtgtatgcacgttaaatacatttgtatgctttttctcctactaaaaataaataaacaaataaatgaataaaatagaaataattgattcaagtaagatttttttaatgaggaaaactggaagaaatgccagatagtaccaatttttaaaatagaaagatgacagaattaaactaaccatatcataaagagtataaatatctcacttaaaaggcagattgtcagatagaataaaaaagacaagaccaaatcacatgttgctaaaagaaaagggcttgaaatataaataaataaatgttttataatgaagaaagaaaaactacaccttaggaagtatacactaattaaacatgaaataactatataaaattataaattatctcaaattcaaatttatctagatgttcctttttcgtttttattatttttataatctaggatcacaaattttaagaatctaaaattttctacaatgataaagaggaaaacaattggaattccacatgtacaatttgataacactcaccaagtatttattgaactgtcacatcattggttaatataaggcttttaggaaaaaagcaaggcagtaaggtatttttgtaacttaactttcaggctgtttacaattaaagttagtgtacaaataaagacaccaatacatatcaatttcttcttaattttcaatgactttgtcattctgaataagctgtgggctaggtactatgtgttaagtaaaactaggaaattcataaacaaatgcttttctaaagacagacagtgctgtcaaattgctagcagattagtgaagagccccagcaagttagcgagatttccagtagtgtgactttggcttggcagtaaaataaagatatgctcaaattgctataaaaacccatgatcccaaattcagaaaagtgataatgggtttccagattgagtgacatgtacagtgagttctaaagagtaaacgccatgtagaaaatcttaacagaggaaaagtgcacattagagagcgggaaagatttgtgccaaaaactagatgtaaaataaagcagactttgtgggtctaaggaatgggacattgttcagtgtaagcggaacacaatctgataaatgaggtggcagcattcgctgacctgatcatgaagttttttgtgtgccatagtactttttatgtcttatctttatttgcattttttctattttgaacttcatttaatcatctcagttttttgttgttgctgtttttgttgttgttgtttttgagacagagttttgctcttgttgcccaggctggagtgtgcaatggcgtgatcttagctcactgcaacaaccatctcccgggttcaagttaatcttctcagattttaaaggtgccagtggagaaaagtatgggtatatcattccaaatacgttcttctttcttttccactactcactgggcaatcctgacagtcacttaacctatctaaggttctgatactttatctgttaaatgaacacattaatatatatacatatatatatatatatatatatatacatctgccaacaacacagaaaaatcattaattgaagcatgagaaagcactctagagaaagcaaaatgatgcataggcttaaatgagtattaatattactgctaaatgtttttattaaataattatatattttttgacaaaccagaaatgtcaattggaatacatgagacaaaaagcaaggagcaaattttcaaatcttttaaaatggtatgtcatatagtatttgtgtttcctaaatagctatcacaaactttttataaacgctaaagggcattttagggtggcttatgttattttaaattgcctgttgttaaggtaaccggttccttgggatttccagtagaaaggatctttccatatcacagtcagactctccattggtgtaagtcatataaccacctgctacattataggtctgtttattgattcttttcaaaagaattccaaagggacagttattgtttaatgtttaaatagttattgtttaatgttaaattgtgtgacttttgcttggcagtaaaatatgcttagattgctgtaaaaacccagaataaaggcaataatcccaaattgggaaaggcaataatggatttccagattgagtgacatataaggcgagttctaaagaataagagtcatgtagaaaatctcaacagaggaaaagttatgagatgatttttaaatggttttattttgtgtataggaaaatgaagacatgactatgatcacataataaatatcttttaaaacaaagttatttttgatgcaaatagaaataatacaaaagagaacctggaaaaagtaatgctgtgatagatgatagtcacaaactgtgcataactagattcattttaaagtcaggtaacccagtagtaaattaccaagaaagataattcctggcaattatttggcaggaatatttggaatcatagacatatacttttctccactgacacctttaaaatttgaggaaattggcggggtgtggtggcacatgcttgtaatcccagcactttgggaggccgaggcgggcagatcacgaggtcaagagatggataccatcctggcaaacatggtgaaaacctatctctattaaaaatacaaaaattagctgggagtggtgggagtgcctataggcccagctacttgggaggctgaagcaggagaatcgcttgacctggaaggcggaggttgcagcaagtggatattgtgccactgcactccagcctggcaacagagcaagactctgtctcaaaaaaaaaaaataaataaataaataaataaattgaagaaattatatgacatccaaaataagaaaaatacaagtaaagagaagccataaaaagtactatggcacacaaaaagcttcatgatcttgtcactgaatgatacaacttcatttgtcagaatcggttccacttttacattgaactattccctactccttaggcccacaaaatctgcttgattttacctccagtttttgacacaattccttcctgctctctgatatgcacttgttttttgttaagcaatagactcggaaatttgagctttcaataaccggatgtatttttgaagttttagaagaaattagtttttgggtggaaatttgtaggtaaataaccaccttctcagggcagttttaaaacagtttttaaattacttgcaagcaattaaaaggtgggttcttgttaaaaggtggggtctgtttcctgaccacttgaatctgggagggcttacacatgccctgatcaacagagtataacagaattggtattttgtgatttctgcggttaaaacattccacttccatctgcttttctttggtcactgaacttcagagtcctgacctgttatataattagtgtgaccaccatgaggtcaccatggtgtgatgaagcacagccccattggactttttaaattcaccatttgtgtaatgatgtggaaaacatattaatgtgtaaatatttgtaaattatcagtaaacatatttcccacaagagtaattaaccgtcatgaacattaacaatgtttttactgcaagaaaagtatatttaaaaatcataggtggtcccttcatccttatacagaagcctacagagaggcagaaaagaaaacatgaggttggctttatgtgtaaatttcagatagctttaacagcttattctctgccaatttatacttcttttgtaaaaatggatacagctcattatggatattttgaacagagtccatggctttgagatcaaactaaagtcacactgacaaaataaaataagcatgaatagtcataaggctaaaaaggtgacttcctatcaattaattgaagaagaaattccattttggtctaatttatattttggccacttttattggctacttaagtaaaataaaagacttgttttaataattgtaatgtggaggatgttttacaaacttaatttttccttgttcaaataatataagtgaatatacagtttaactccagttctaataaattctctttggcatgattttaagtaagttcatcatcaatgaacttatcattagggtctcattgatgtcttagggaaagcacatgccatggaaaatcccctgagattttacagtgatcatctttgccttttaatcctaagcatctattgctttatctgagcctgagttctacatcagtgttgatgaaatgattgggttagagcaaattatcttgaaaagtcttttccagatcagtaaagttattccaagaatggcttcgcctttgatctcttttgatcagaaccattttttggagaatatctgattcaaatgattgatccgatgatcactacactaaaagtacacattttctctttgatattgtgcctttcaatattactaatcatatcatttaattttggtcttttatattcagaacaatatctaaaaaatatttatgaatgagccatcactaacaattaaaccacccaaagggttcatcttgcccactgttcagatacagccaatttataaagacaggggaattgcaatagagaaagagtttaatacaggtagagccagctaaatgggagaccagagttttgtttttacacaattaagcctccctcaaaatttggaggctacaatttttcaagggtactttggtggacacggggctagggaatgggagctgctgattggttggggatacaatcacaggtctgtgcaacatggtcctgattcgctgagttggcctgtgtgtgcaggccacagaggagtcactggtccaggtggagcaatttggtcatcagaaatgcaaaagcctgaaaaggcatctcaaaagggcaatcttagattgtataatagtgatgttatttgcaggaacaattggaggagttacaaattttgtgacctccagaataatggctgctaatcattcaactatactcttagcggatttcaggaccctctcatcttcctaacctggtggtctttcataattagttttacaaaaatgatttagttttggaaagggttattatcatctaaactgtaaactaaatatctcccaaagttagtttgacctacacacaggaatgaccaagggcagtttggaggttaaggcaagttggagttggttagaacagatctgtttcactgttataattttctcactgttataatttttgcaaaggtggtttcagtaagtctgtgcaaatcaatgttttatggtcaaaatgtccagccactttaagcacattgacatacatcagtggctttcagctttttccccattttaactgagccaaaccaattttcttatcagcgtagcaaaatgaccagagcatttgttatgctatgtggtttaaaaaatggtatgttggtttcttacttagcacaagatattataaataagaatattttgtcttgttttccaaaaaaataaataaatctcatttgagattacaaaaatcaacgtattttttaaagcacttaatagatatagttattattaatgggaataaggttcacaacaccctatggaaaactgatttactcatattcatgtgcttactcaagaggaaaaataaatatataagcattcagtatgtggcattaatccaagagaagtaaaaaaatgcaggcaaaaataatttaagaaaatgaattaagatttgtaatgacctacatattttctctagctatcatttctgaatttaggttttcaatgaataaaataaatttaaatgaaaatgggatccatgcctcaatgtagctactacatgattctttaggtgtaaatcctatctccacaatcatctttgaatatttgccttcaccatgcttcacattaattaaaggactcacaagcatttaaaaggttgctattttaattccttcaacatgaccatttgtcaaggctggattttttttattcaaagattctcaattttcattaataggagtgggggtagtagattacacttaataatacagggcagctgcttagagttttctttacgtagagcagcataagaagatcaccagtaataacatgtatattgcagtgggctgccactagcccattcctaagctgtttgattacaaatcagaaaggtcacctatatgagcagaagtaacctgctgggagccatagcacatagatatgcagcgtgtgggctgaatctcagtcccaaattacccccttatttgggtcttttctctataaataatttttgtaacctttatctataaataactttataaataaattttgtaaataactataaataaattttgtaacaaaatattccttagaataacaatagctcagcaattttcacagaataagttcagaggctagctctgctatttacttacttggtaacttagcctccacacctctgaaattctgtaaaatattacaaagtttcagaattgcaataaaactcaatggtaacttataagacagattctaactggatataaagttgtgcacatatattaggagtcattaaatggtatagattattattgtaacagttgtacaactgtaatataaaattgagaaaaattacaacttattcagtaaactaaataaaattaaaatgaattagatacataagactttccatcttaaagatattagaagttagaatactctaataacaattagaaagaactaggaattgagagctgaggtacatgtgatattgtttttcttcattaacaaaaaactgttcattaccaatcaactacatgtataattatgtttacttatatttaggaaaacaaaagccaaaatgtacctaaaaacttgtaaggacaaactttttaaaaacaatatttttaaaagagtactgaaatcagtttgatttatttttatgtttctccttcatatcactaaaatagtagaactgctaacctattcttaccactttactcatactccacgctgaagtaagtttcggtttttaataattcagtaattaagacatggaaacttacatttaaaatgccaaaaagccaaggaggctatattccttatatgtgattgcatatcatcaaagatgactaagaatgccttcaaaatattttactcatggcaaagagatgaagatgttgggctgaaatctccaagcactggtttccttggttatcatatgagtgttatacctgaaaatgcagttcttcattcatgcaagatgcatcgttttaccaggacgtcaccagtcaaatagagtatatcttacttcctcttttctaagatgtatattttttctcaatttcacatttctgatatggtggtttactgtataatcactgcctacattttgctgaggttttccccaaaagccattataaacctactggtacagtttacattccaggaagtaacgtgctctttgtctcctcctcctcccggaactctactttcagtgtgaatcctcgtgcaaaggggccagcatggatgcattactcagtgtactcgtgtaacaaacctgtacatgtaccccctgtatataaaataaaagttgaaattatttttaaaaaattagtcaagggtgttctggaaaactgagagtaaaggatatataagtagtgattgaaggaagttgggctgcaaagttatgcttggactaaaatgtgagccaccttggatattgtagatttttaaattgatttggaggatgataggagggatgtacaaatgagatttcacaggctgagagatctatagactattaaacagcaaacagatgcaaggcatgggaagagggatggtcagcagcccacaggattgtggagtgactgttaacaagtgcctgaaaagagaccagacccactgtgaatctcgactcctcccctattggttctgccgttatgagcaaatttacttcctttctctgagcctcagttaatcatctgtaaaatgggaaaaaataacatctactttgtaattttgttagaaagacttgggtatcaagctcttagcagataataagcatgtgatgcatggtagcaaaaccaaaattaagaacagctcacggaataattgggtctcacctgctcaccagcttctctggaaaacctgttacctactttgtgcttgagtgtatactttcccccatgtttggtatactctaaaaaaaaataattaaattagaagattttgtttcctttttgctgtggtgagctctaggatattggtaaattcccccttgaaaggctttcactgtgggctgtctttgaacatctacccatgcaaccatgccatgtggcaaggatgactacacagcacttacttcaaggccttgcctggggattgaaacaaactgtagggaagggggaaaaagcaattaactgtcctgtttaaggtaaaaataatggaaagaaagccacctcaagtaactgtacgtgagttgacctttgacacactgaccaaggtgtcatgtcttcaagagacattgacatctctgtagcttcatgccttttccagatttgatgtggcagatacatgcatagcagagtttatcatgtgtggtttcctttagacgctgtgattatgtgttcaataaattgcatcaagactacaaatgctttgttgtgaagtccagcaacattaacacattaagtttcataatgtgattcctagaacaacctctaaaaactctccaaagaggtacattcaaaatctccatagatgaatcaaaatagattcatctcaacagaattatgctaagtaaaatctcaatatcagaaacaaattatatatgattctatttatataacattgtcaaaatgataaaattgtgtggagatagagaatagaatagtggttgatatggcttaggggagagtgcacaagggcatgggtttggttataaagagatagcacaaagaagttttgtggtgatgaaacagtttttttttttatcttgattgagtggtcattacagtaatctacacatatgagaaaaccacaaatacatataaactacacaaatgagtgtatgttaaccttaaaatatcagagtaaattctctggattgtacaaagactaattttataaatttcatatggtactataattacatgttaccataagaggacatgaagttaaggctgcaccagatctcactaccttatttgtgcatctgcctatgaacatacacatatttcacaataaaaactgaaaaaagcagtgacatagctatagattctgcttatttataagtttagatagaaagatagacatagatatacaaatttaacttagtgacaaattaaaatttaaaaagatgttcagtactacctgaagaaaattctaagagaaataattaaattacattatatgtacagaggaaaaaatacaaaaaggccatctaatttcagaaaattgttgtattattcagtgcaatttcaacaaaaaacccataggatttcttgtgacatgttcatattgattatgaaatgtatacaagaattaagtgccaagaataccccaaatcttactaagtaagaatacattggttaacttgctattctataaagccatacaaataagttaatgtgctattaaacagaaataaacaaattgatcaatggaataaaagagctataaaaccacaaagaaataaaaattatgtatgacatttggcattttaggtcactggggaaattataaactttatagacttactttagtagacattctaaaacaattatagaaaataaattatccttacagaaaataaattacattgactatccttagagaatataagttaaattggttttccagcctcagagtgtgcacaattgattttcaaagcatggcgcctagtccagagcatcaatataaactgagaacatgtttgaatctataatcttgggcccaaccacagaatggctgaatcacaaactctgttaggtgggacaacaattcatgttataatgaaccatctaagtgatacagatgcacaatgggatgtaagaacaaccttagtaaccacaaatccatcacttgagaatcaaacaattagaagtaaaaaacagatctctaaatattttcaaagagtgtattaggtatttttctgatgttgggatctgagtaaatttattaaacaagaatttcttaaataaacacaaattctgttaaccataaaataaaagaataacaaagtttaccacatggaaactaagaattcattttatgaaaagaaagtaaaacaagactaaactttaaaaagattttccataattgccaaaaagttaatgtttacagtatataaggaacttctataaaccaatatgaaaaacacaagcaaggcaagagaaaaatggggaaaagatatagcagcaaaaaaaagaaaacgcatgttgagtaaacatatgaacagatgctcaacctcattagtaatcaggaaaatgtaaattaagccacaatgtgatactatttcacacttacttgattggaaacatctaggaaatataataataccaatttattactttgaatttaaacagactcatatatactctttgtagaagtgctaagtaaaatctcttttgaaaacaattttaacattggtatccccttgttctatcaacaagcaattaattccatatgaaatttaaagtagttttttctaattctgtgaagaatgtcagtggtagtttgaagggaatagcattgaatctataaatgactttgggcagtatggccattttcacgatattgattattactatccataaggacagaaagtttttccatttgtttgtgtcctctcttatttcgttgagcagtggtttgtagttctccttgaagaggtccttcacatcccttgtaagctgtactcctaggtattttattctgttcatagcgattgtgaatgaaagttcattcatgatttggctctctgcttgtctgttgttggtgtaaaagaatgcttgtgatttttgcacattgattttgtatcctgagactttctgaagttgcttatcagtttaaggaggttttaggctgagatgatagggtattctaaagataaaatcacgttgtctgcaaacagagacgatttgacttactctcttcccatctgaatacactttctttctttctcttgccttattgccctggccagaacttataacactatgttgaataggagtagtgagagagggcatccttgtcttgtactggttttcaaagggaatgctaccagctttttcccattcaatatgaaattgcctgtgggtttgtcataaatgtctcttattattttgagatatgcttcatcaatacctagtttattgagagtttttaacatgaagcgatgttgaattttatcaaaggccttttctgcatttattgagataatcatatggtttttgtctttggttctgtttatgtgatagattgtgtttattgatttgtgtatgttgaaccagccttgcatcccagggatgaagcttacttgattgtcatgggtgagttttttgatgtgctgctgggttcggtttgtcagcattttattgaaaatgtttgcatcgatgttaatcaggaatattggcctgaagttttatttttgtgtgtgtgttatctgccaggttttggtaacaggatgatgctggcttcataaaatgagttagggaggagtctgtccttttcaattgtttggaatagtttcagaaggaatggtaccagctcttctttgtacctctggtagaatttggttgtgaatttgtctggcccgggctttttttggttggtaggctattaattactgcctcaatttcagatcttgttattggtctattcagggattcgacttcttcctggtttagtctgggaagggtgtaggtgtccaggaatttttccacttctttcagattttctagtttacttgcatagaggtgtttataatattatctatatagtagtagtttgtatttctatggggtcagtggtgatatcccctttatcattttttattgtgtctacttgaatcttctctcttttcttctttattagtctagctagtggtctatctactttgttaattttttcaaaaaaacaaatcctggattcattgaatttttggagggtttttcatgtctctatctccttcaactttgctctgatcttagttatttcttgccttctgctagcttttggattagttttctcttgcttctctacctcttttaattgtgatgttagggtgtcgatctgagatctttctggctttctgatgtggacatgtagtgctacaaattttcaactaatatggttttaactgtgtcccgggagattctggcatgttgtctctttgttctcattagtttcaaataactttttgatatctgccttaatttcattatttacgcagtagtcattcaggagcaggttgttcaatttccatctaattgtgtggttttgagtgagcatcttaatcctgagttctaattagattgcattgtggtctgagagactgttatgatttccgttcttttgcatttcctaaggagtgttttatttccaattatgtggctgattttaaattaattgccatgtggcacagagaagaacgtatattctgttgatttggggtggagagttctgtagattttggggtggagtgttctgtagatgtctatatagctgagttcaagtcctgaatatccttgttaattttctgactcgttgatctgtctaacattgacagtggggtgttaaagtctcccactattattgtgggagtttaagtctctttgtatgtccctaagaacttgtttcatgaatctgggtgctcctgtattgggtgcatatatatttaaaatagttagctcttcttgttgaattgttccctttaccataatgcccttctttgtcttttttgatctttgttggtttaaagtctgttttgacagcaactagaattgcaacccccgctgtttttgtttgtttgtttgtttgtgttgcttggtaaattttcctctatccctttattctgagcctatgtgtgtctttgcacatgaaatgggtctcctgaatacaacacaccaatggccttgactctatccaatttgacagtctgtgtgttttaataggggcatttagcccatttgaatttaaggttagtattgttatgtgtgaatttgatcctgtcatcattatgctatctagttattttgcacactagttgatgcagtttcttcataatgtcattggtctttatattttggtgtgtttttgcagtggctggtactggtttttcctttccatatttaggacttctttcaggagctcttccaaggcaggccttgtggtaatgaaatccctcagctttttcttgtctgaaaaggattttctttctcccttgcttatgaagcttagtttggctggatatgcaattatgggttgaaaattcttttctttaagaatgttcaatattggcccccaatctcttctggcttgtagagttcctgctgagaggtccaatgttagtctgatgggcttttctttgtagatgacctggcttttctctctggctgcccttaacattttttccttcatttcaaccttggagaatctggtgataacgtgtcttggggttgatcttctcatggagtatcttagcggtgttctctgtatttcctgaatttgcatgttggcctgccttgctaggttggggaagttttcctggataatatcctgaagtgtgttttccagcttgtttcaattctccccgtctccttcaggtactccaatcaatcgtaggttcagtctttttatgaagtcccatatttcttggaggctttgttaattcatttttattctttttctctaatcttgtctgcatgtcttatatcagcaaagtgttcttcaaactcttacatcctttcttccgcttggtcaatttggctattgatatttgtatatgcttcatgaagttctcatgctgtgtgtttcatcaccatcaggtcatttatgttcctctctaaactagttattctagttagcagctcctctaaccttttgtcaaagttcttagcttccttgcattgggttagcacatgctcctttagctcagggtagttttttattacccatcttgtgaaacctacttctgtccattcgtctatctcatcctccatccaattctgtgaccttgctggagagacactgtgatcatttggaggagaagaggcactcttgccttttgggttttcagctgttttttgttgattctttctcatcttcgtgagtttgtctagttttgatctttgtggctgccaaccctttgatggggttttttgggggggggcttttatcttgttgtcaatgctgttattgttgctttctgtttgttgtttttctttcaatggtcatgtctctcttctgcagggccgctggggtttgctgggggttcacttcaggttctattcacttggttcactcccactcctggagatgtcactcaaggaggctggagaacagcaaagatgaatgcctgctccttcttctgggatctctgaccttgaggggcaggcaccaacctgatgccagtaggatcgctcctgtataggatgtctgacaacccctgtcagagggtcttacccagttgggtgaaacgggaaacaggacatgtttaacaaagtaccttgactgtcccttggtggagggggtgtgctttgctggggggaaacccactcaactaggctgcccatattcctcagaactaccaggaggaaaggataagtctcctggtccacagagtctgtggccacccatccccctaggggatcaggcccagagagattcaggttctgtccctgagcctctggctggagttacgggagttcttgcatggaagccccgcccagtgaggaataatgagtcggggtcaggcctgaagaggcactctggctgcagtcttccacagctggtgtgttgggctgtgggggacacatcttgggaccaagccgtccagcctccctggctccagcaggggaaaagcacagcctggagctatagagatgaatgccacccttctcctgcccagggaccttagtgtgttaggaagttgtgagtcccagtgctgaatgctgccccttccccaagaagctcagatggctgagacagcaggcagctgcagctgtggtgctggtcgcccctccccctgggagattggtaggcttaagcctattccagctgagaggctgttgataatctgcatggctccgtggcatgggtttgtgagtgggatcttccacttcatgtgttgcacatttctgtggtaaaagcacggtttcccagcctgggtagcatgctcactcaccacctcccttggctgggtggtggaggctcccctgctcgtgtggctctcaggtgggctgctacaccacactgcacctcctttctctctgtggagcatgccagcttcctagtcagttctgatgagagaagctggataccttggttgctggtgaaagattcacatacttgttttggctcttttcgatgggagcctctgattgccgctatttctagttggccatcttggtcccctgcccctgccatatgacacacttaactgtaatgccgttagcacacggagccttagataagcttggttatcaagaacccagacatttcatggataaggttcagttttaatctactagggaagccactatttagttgctcagaagtgagctcagcagaagtgtttggtgcatgaaattggaatctagaatcaaagagaataagagggatgatagatatttgttatagccttggtagcaactaaagcagcagagactccagatcctcacattaatgttccttttactacatttcacagaaattgtgaacagtaatgttattaataaacaagttaaactaagcattgtaggggaggaaatgtaaggatgtcttggaccccagtcagagccgcttcactgagctgtcgtgcccattctctgcttgctttgattgctggctgctagtggcacacagttgtctctattaggttattgccctcacttaaataagaggtgtttcatctgggaagttttggctcccagggcagccagtcatccagtgtccctctgactggcacagaggtacaaaggctggtggtgtgccctcaaagaagctccaacattatggtgccactcatgctccaattgccctatgaaactgggccacttcttgtctctaattaagatctcattctttcttcattgtctagccagtcaatttctctattccgcttctaagaatgctaccttaagaattgcctttacaagaattcctctcttaggctttccttgcaaggtacctaacctgagtcaatattcctattcctaaatcatctcagatcccctgagatgctggatatccgaaattgtccaagatcatataaagatatgaaagaaaacttatctcaatattccagtattggggcaaaacattttgccctcaaagtttagaaatgttgcccaactgttttttgaaatttatttctataacaaagacgtcttacattaatctgacttttatttctctatgcttttctttgattcaaatttgccagtgtcatcaaggtatagaaattgctgttgtttttgttttgcactgctttgcttttatttttctttgaatatgcatctacctttctacgtgcattcatgagagtttttgcctttttcctagttcataagtatttttattttagttagtggagaattggtgtttattttctaaaatcaaccaagattatctattaatcctataataagttatcattaactttccattatatcattacttatttcatttgtgtttatatgttccctatcttctatagcaaaaatagttcaaagatttttaagttattactccttcaattttatatagcctctatcttaatctaaaataatgtttaatacattttaattttcatgacagtaattctgtgttctacctatcttacataattcataggtattatattttttaaaatgtaattatgactgggtgtggtggcttacgcctgtaatcccagcactttgggaggccgaggcaggtggatcacgaggtcaggagatggagaccattctggctaacacggtgaaaccccgcctctactaaaaatacaaaaattagacatgcatggtggtgcacgcctgtaatcccagccacttgggagtctgaggcaggagaattgcttgaaccagggaggcagaggttgcagttgcagtgagtcgagattgtgccactgaactccagcctgggcaacagagaaagacttcatctcaaaaaaaaaaaaaaaagtagtgattataattttctgatgttattttataaggagaggtaaaaatagtgtgtttttctttacatcctgggtctgtgccaatctaagaaaaaagtagatacgttcagatggaactacaatataagcattgacactgaaagtggatttggtaaagaacatttaaaatctgtggccaaagtccttgcaaactctccatctccagcaatgcttacaataccagtctcaataccaggatatcacacctaggaaagtgcacattttcaagcttcatgtatttagctagacttgttgttaaacagggtagaacaataaaacaagaacatgaatgattcagttaacgcttgcaacttatagtaaattacttctacctaatcgagaagagttaagaaatggatgccattcaccaacatgatgaacaggcacagcaaaaaggtggcaatgttcctcaagatgtaatccctccacagggaaagtggagtttatgtaaatgaaaatctcttgcagcaatcttcctttattcattaatattgacaagaaatttctaaaactgtctctgaaatattgtgtatatcatgtctagacataataattttaacttttccttttttatagtttttttccactgagaaggcccatgtttgaaaattttcatatatttatctctgaaagaagttaattttacaagattcatcatctagaaatatatattctcttgttacaatttctgcttacttctctggtttattatgaaacttgaaaacataagtgcataaacaatctccaatgtgcaccacctgtggaattattcccttccctaaaatacttctttttccccaaagtcagtttcactggtcaagactatgcatttctactctcattcttcacaatatacctctttgcactgtattttcaggaaattgtgctctttggattaatgtagaaagaaaacatgctaataacattaggaatgcctcaaaaagtataactatactctccccatttttctgaaaacatttgtttcttactctttgtagtgggtgttattttaagttgtaaaacatatggaaattagccaggcatggcgatgtgcacctgtagtcccagtcacttgggaggctgaggcaggagaatcgcttgaacccaggaggtggaggttgcagtgagccaagtttgtgccactgcactccagccttagagattgagtgaaatcttgtctcaaaaaagaaaaaaataaaagaaataaaagaaaaaagatattgaagtaattgcaagaatttcacttaaaagtaagccctttttataagaactttttaaaggcatttatacacattttaggtttgtatttgtttgtttgtttgtttggacagagtcttgctctgtcaccacagctggagtgcaatggcgtgatgttggctcactgcaatctccacctcccgggttcaagcaattctcctgcctcagcctcccgactagctgagattacaggtgcccgccaccatgcccggctaattttttgtatttttagtagagacggggtttcaccattttggccaggctggtcttgaactactgacctcaggtgatccacctgcctcggcctctcaaagtgctgggattacaggcgtgagccactgtgcctggccattttaggttgatttttatatttctgtttaaattattatgttttttaaattggaaaaaaaatgaatcttaaatacatacatacatatatatatatatatattttttttttttaaagactcttctatgaccacagagtcaagtataaatccaggactctgattgaggcaatcaaatccacagatctgattttagaaagctatgttttaaaatgccatgttgtcatctctcttttctcttgtgctctctcattctgtctctctctttctcccatccacaattctatcttttgccttcccacttaccaacctatctatatatttcgtatctatccttctatccatccaatcaactgatatatctatcttttatatatgtgtactttttttcttgtttcatactcaactgatgaaattgatggaatagttgagcaatgtaagtgaaataatatattgtcacacacatttattgaatggatattgtgttgtgagaattataagggtatcaaaaaagccatacacaaaatctagaacagttgcctgtgtttagaaaaaaaatacatttcctagtaagtgatcattttaaagaaacgtttcacacacacccaagagcaaactttcacccatgcaatgtttgctgtataagcatataaaagttacctgtataacaaatgtttccatcaaaggagaagctctaccagcacacttgaaatatgatctataaaagtgaaatatacaatacatagttattatattagcactcataggaattagcacttataggaagcaaatatactacaaattagagtaaatgaaataaatgtcatccagcaagtaacatcataaacactggtctgaatgatttcatatgtctggttaaagtttgttttctttgtgttggttttaactataaatcccaaaataaatttgcctattactcactgattttatggaaattgtaagttgcttatttaaggacattaaaaatactctttagcagtacccccctttattttttactgtgaagctgtgttaatttcagagaagttaacattaccaaaaaaacaactattttaattaatataaacattattatagatatgctatatatctatatatgtggttgcataatgtgtgttttatgtacatacagatgtgtatatatttatatactatatatatatatatataaaatgctaactctagccttataaacccttttaaatttcaaataaaaatcataaggtatgcctgatgtcactttacattttaattcagaaaaaaattataaaatgaaaagaaatccctaaaagagaaggaatatcaagaaggactcaattgctaaagtaggtcaaggacaattaaattgctttcttaatatgtctgcttataatttgattatttctgtaaattatatttttacaaagttcctttgaaaatattgttcttttgttttgataagcttttaagacacattcacacattttatttcctgtcagccattttctttcatcataaaagtcattttgttagggtcttgatttaattatagactctattcattagggcaactgaccaactcaagaatccctactgctttattcaatagaagtagttcctggagttttgtgtttaatgcactccattttccctagttcataaagtgtgaaaacttatattttattcagtatttttcttggctctctgattgaatcagtttccaaggaatgagacatatgtgtgagttatatctcctttacaaatattctttcttgcaaggaattactttttcattgccaatatggggattggctaggctaagtactcatatatgcctattgtgaaaacatgttttattgaatggccttaaatctttatgtttcttgttataaaaatccgtaagaaaagaatattgcaaaagatttaaaaatttttttaaatgtgtatatttgtaaggttaatttacatattaattgttgtcagtaaaattaattgttgtcagtaaaataatcttgacacctaaaggactttttaataaacacattgacagagttgtttcttctgctatgcagcctgtcttctgcaccatattgattttaaggtccttacgtgtggaatttgttttggacaatattggatagaaggccctcgaagagtataataggggtatgtggtgggggaaaattagtatttcacttttcttaatagccattgttgaaccatgcacccaagcactacaacaatggttctgtatccacagcccacaatgggattcaacctatgaactttgtaggggaacaaaaaagttaaatctttatgttcactaatatatctaactgaaatttagtacatcttagatatatgcaaacaatacaaagtagtattagagtgcctggcctatcttgttgccaattaaaattttgtatattttcatatcacattaccttgctgcagatatactgaaatatgttgactggagaataattctctgggtgaccttagaccaacccgtttctccccattttctcacttagagttctcaagaatgattgcagaatgtgttgtgaatgcaatgtcctgagataagaaagaactatctggaacagcctggtctctttcccagtccttccctagaaacagaatgtccttcaatgctttaacccagtgatccatggaactctgtggttataaaacccattatgtgctggtttccagggcctcttagccatggtgcaattaaggtatgcacagataagactctgtctaccctgggcagctttcctgatccatggcagtctggcttacaagcaatactaggcttctattgtctctttctgtatatttgtaagtaataaatctacttcatataactcattatgtataggtgttctatctcatcaaacaaaagcaagttgggaaccagtgcagagtgaacctgcttcacatttaaaatcaaagctaccacaatattttgctacttattagtccagccttaagacttcatcatttgatgtgtcagtatgatcacatacataactgaattttataatctctatagtttgactaatatgtttcaaaataattaaatttatttgtaatcctaagtattttattttataaatgtataaaaattacagtgagcacacaggaaacaaaggcaaaaataggccaatgaggcctcatcaaacttaaaagttttcatttgtcaaaggatatcacgaacagagtaaaaagagagcccatgaaatgggagaaaatatttgtaaatcacatagctgataagaggttaatatctagcatatataaagaactcctacaattcaagaacaaaagttcaagtaacccaattaaaagtaggttaaaaacttgaataaacatttctccaaagatgatatgcaaagtccagcaaacatgaaaagatgctcagtatcactaatcatcagagaaattcatttttctgtgagatatcaccacacatccattgggatagaaaccataaaaaacaaacaaaaccagaaagtaacaaatgtgttagcagggatatggacaagttgaaacccttgtgcattgttggttggattgtaaaatggtgcaacctttatggagaacaatactgacttccttcaaaaaattacaaataccaatatcatacgataatcagcgatcacacttctgggtatttaccccccaaaaagtgaggttctcaaagagatctttgcatatgcatgttcatagcaacactatttacagtgtagatatagaaagcataatagttgttaccaggggctgggaacagggggaaaggaactttgttgtttaatccatacagagtttcaattctgcatgataaaaacattttggagatcttaacactgctaaactatacccttaaaagtggaaaattgtatgatatgtatgttttacttcagtaaaaatcatatactgagaacaagcctgtaagcttcactggattttcccagtctttggtgtgaaaagggttacaaatccctacactagaggaatattggacaagcctgatttgccccttcatactgattctttcagaacaagtttattaatttttaatcttctgagatgaatcatcatacaattcctcagtttatgaaagtatctctgcacagcctagcattttgaaaggaaaataaaataataaataatgttcctacccaacacttacctgaatttagttgagactgccatgtgtacatgtttgaaaaagatttgggaataatcagcaagaaaaccctctctctccttcctcaaaaattatctacaactcctagtattttcttcataatttccagatttacataaaaattatgaaaatctagttaactaacatttaaaggagaataagattttatcttatagacagtaagtgccagatatggagataaatgatctgattatcttactagaattgaatttttgcggctgagtttttgaataaaccaagacttataatattcctgtaccctataaagcacattgactactgattctttcctgcttctgaaaaaggcacaaattgagagggaagtttatatgttccatctcagatacaagcaataactttccatataagggagactgatggtaattatctccacatccctatagtactattattaatgataatggtgactcaaattggaagccctttgaatataagtaagtggttgtaaaaactgaaatttcaacctgatgaattcacatgtaatcacttaaacttacagaactttccaaaaggatggaactggcaattgcagtgaatttattcaattggatttggccttttgattttatgtttgagagctaagtttgtatagaagtgttcattaaaagaaaaagttacagaatcatatacttgagacatttttggaaaaataatatataagcataagttgtcttttgcctatttattaaagccattctagtgtttgagaagtggtgtttcttgttttcatgtgcattttcatagtggatagtgatgttgggcattttttatatgattattagccatatataattcttctttgaagaaagagctattcaaatccactatactttttgatttattttcttttacttttttttaattggggattttctattcatgttatgatttgaaatcattcaggactttgtttcttttgatgcttataattctttaaccatttcagaactgactgatgcatttataatgctacaacagaatcttattaggtgactgtattgtgtatagggtggtcataacaaagtaccacagactgagtagtttaaacagcgggaatttattgtcacagttccagaggctgcaagtctgagatgaaggtgtagggagggttggtttcttctgaggcctcccttcttggcttataggtggccatcttgtccctgtgatttattttgttagtgattgctctaggaacaacaatatgaacttcaaattatagcattcaatttaagaataatagtagctttaattccttaaactatggagaatttgcttcaatatagctccatttcatcttcctcaactttcggctatgattgtcacacacaggtatatctctgagatattgaggctttggttggacaccactgcaataaagctcttatcacaataaagcatgtcacaccaagttttttgtttcttagtgcatatcaaagttatttttacattataatgtattctattaactatgcaagcattatgtctgaaacaatcaatgtacatatcataattgaaaaatattttattgctaaaaaatctctttgtgcagacacacaaagtaagcacatgctgttggaaaatggtgttgatagacttgttctacacaagtttgccataaactttcaacttgtgaaaaaaacaaaacacaatatctttaaaacacaacaaaacaaagcacaatatgagttatgcctgtgcattacatctatatatgttataaacttatttttaaaataattattgtatacaattttattatttataaagaacttaaaagaagtatatggacttttatatttacctaaatatttgcatttttggtgctttctctgtatttgcatatacttgtattattacctggtgatatttcctttcagcctaaagttcccactttaatatttctggtaaacagctctgccagtgataaattatttcttttttccttatctgaaaatgtctttattcaatgtctctggactcaattatatgatttttctcccctcagctttattaataaataaaaattgtatatatttaccatacaagtattctaaatccattgtggtcagttcaacaatgttcacagtatcttccccaagagcagatttcaccttaagaaaccactttctttgcttatccataagaaacaactcttcattcgttcaacttttatcatgaaattgcagcaattcagtcacatctagttctcttgctttttctcctacatttagtaccctttaagccagttctcttcatcatcccagctctcactcatcctttccaatctctgttaagtatttctccactcttaacctccatgtgatcaactagattttagttcccacatactagtgagtacttgccatatttgtatttttgtgccttgtttattttactaacgataatgatctccagatccatccgtgttgctgcaaatgacgatttcatttttttatggctgaaaagtattccactgtatatatacaccacattttattcatccatccattgacaaacatataggttgatgctatatctttgctgttgtgaatagtgcagcaataaacatgtgagtgctggtgtcctttgatatattgctttattttcctttgggtagatatccaatagtgggattactggattgaacaataattttatctttaggttttttgataaatctccatgctgtgttccacagtggctgtacaagtttatatttatgtgaacagtgtataagcgtttctctttttccacatccacaccaacatctgttattgttttgcctttttacaatagttattctgactggattaataacacatctcattataattttgatttgtgtttcttcattgatgttgaaaattttctcatatacctgctgtccatttgtatgtattcttttgagaaataccatttcatgtcttgtctccaatttttaatgagattatttatattttcctgttgagttgtttgaattcctcatacattctggatattagtctcccattggatgaatagtttgcaaatatttcttccattcaataggctgtcactttactctgttgattgtttcctttgctgtgcagaaggtttttggcttaaaatagttccatttgtctattttgtttttgttgcctatgattttggggtctgggtcataaattctttcctagaccaaggtccatgatagtttgcactaggttttttcttctagtagttttatagtttttggtcttaaatgtaagttgtttatcaattttgaattgatttttgtgtacggtaagagataggggtccagtttcattcttctccatgtgactatctaattttctcatcactgtttattaaagaagggtttatttctccaatgtaagtttttgtcagctttgtcaagatcagttgagtgtaaatatatgactttatttctgggttctttattctttttaattggtctgtgcatctttttaccaataccatactatgttgattactatagctttgtaatatattatgaagtcagataacgtgatgccagttttgatctttttcttaatattgttttggttattggggtctttttgcttccatataaattttagaattttttgtaattctgtgaaaaattatggtattttgatggggattttattgaatctgtagattgctttgggcagtatggtcatcttaattatattgatacttcttatctatgagcatgggatatttttctatttgtgtcatcttcaatttcattcatccgtttttgcagttttctttgtggagatctttcactttcttggttaaatttatttctgggtattttactttagtgtagttgttgtaaatggtactgtcatcttgatttctttcttagctatattatttatgtacagaaatgctactgatttttgtaactagattttgaatcctgaaactttactgaagtcgttgattaggttcaggagtcttttggcagaaacttcaggattttctaggtacaaaattatatcatcagtgaataaagataattgaacttcctttcctatttttccaatttgtatgcattttatttattgctcttgccaattgttttggctaggacttagtactatgatgaatgggaaaggtgaaagtttgcatctttgtcttgttccagtttttagctggaatgttttcatctttttctgttcagtataatgttggttgtgggtttgttgtatatgacctttactattttgaggcatatcccttctgtgtcaagtttgttgagagtttttgttttgaaaggatgtcaaattttattacattatttctttgtgtttattgagataattatgtggcttttggccttcattctgttgatgagatatatcatatttgttgatttgcatatattgcaccattcttgcatccttggtataaattccacttgatcatggtgtattatctttttgatgtgttgttggactccatttgatagtattttgttgatttttgtgttaatgttcatcagggatattggcctatatttttcttttgtgtgtgtccttgtctagttttggtatcaggatgatactggcctcaaaaaccatgacaggaagaaatactttttattcagtttttggaacagtttcaggaggattggtataccagttctttgtacatttgggtagaattcagctgtgaatccacttgctcatgggtcgtttttgttgcaagactttctattactgattcaaccttgctacttatttttggcttcttcaggttttctatttctttctgattcaatcttggtaggttgtatgtttccagaaatttacccatttcctctaggtttttcagtttgtcagcatatagttgttcacaaaagtctctgatgatcctttgtatgtctgtggcatcatttgtaatatcttcttttcatttctgattttgtttatttgggtcttctgtcttcatttcttggtagtctagctattggttcatctcccatcagttatcttaactaattcatcagataatttgctgtagcttctacatcagcacttgctgtttcatcttgggattttatgctgtagatacaactgctttccatgaacctcactgatccacctttgccagcttcacatttttcttccacatcttcctaacttctctgagccttcatagaattgaagcaacttagtgccttgctctggattaggcttggctgaatggaatgttctggatggtttccagaatcatttatccagaccactaaagcattttttactatcagtaataagactattttatttccttattattagtgtgttcaccgatagagcccttttaatttacttcaaaaaattttctttctattcacaatttggctaactctttggtatgtgatgcctaaatgttgtccttcccagccttcctcgccaagcttaatcatgttttcttcacatgctttcttcactcagtgtaatcatttttagcttttaatttaaagtgagagacatgtgactcttgttttcacttgaacacttaggagccattgtaggattattaattggcttaaatttaatattgtatttttctcaggaaatagggagaattgaagagagaaagacagataaagacacaaccaggtgatggagcagtcagaacacatataacatttattaattaattcactaccttacatggcatggtttgtggtgccttaaaacaattaaatagtaacatcaaagatcactgctcacagattactgtaacagatatgataataacaaaaatgtttgaaatatggtgagaattactaaaatgtgacagagacatgaagtgagcacatgctgttggaacaatggagctgatggtcttgttatacacagaattgtcacaaaccttcaatatgtaaaacacacaatatctgagaagtgcaataaagcaaagcacaataaaatggggaatacctgtacaatgctatgttttgatctatgtatacactgtaaaatggttaacacaatcaagtgaatggatgtatctatcactctacatgtatctttgtgtgtgtgtattgtgggaacatttaagatctaatttgttagcaaatttcaaatatacaattcagtgttattaactatggtcaccattgctatacattagatctccagaacttattcatcctgcctaactgaaactttgtgctctttgactcacatctcagcaatactcccactcccagcccctggcaaccaccactctattctctgcttttgtaaattcaacttttttagattccacatataagtgagatcataacatatttgtctttctgtgactgtcttatttcacttagcctaatgttcttcaagttcatccaccttgtgacaaatagtagtatttatttctttttaacactaataatattccagtgtgtgtgtgtatgtgtatgtgtctcacattttctttatccatttattccttgatgggcacttagattgatttcataccttggctattatgaataacgctacaataaacatgtgagtgcaggtaactctttgaggtcctgacttcagttcttttaatatatatccacaagtggtattgctggaatttacattcatcctattcttattatatgaaggacctccatattgttttccataatgactatactaatttacatcctcaccaacagtatgcaaagattccctttagtccatattctttccaatacttgttaccttttgtctttttgagagtagccgttttaacaggtgtgagattatatctcgttgtggttttgatttgcattcctttgatgcttagtgatagtgaacattctttagtattcctgttgtccatttgtatgttttcttttgagaaatgtctatgtacacctttttctaatttttaatcagggtatttttttttttgctattgagtttcttatatattttggaaactaaactatcagatgttcaaatcaagttacattcctctgtttatgaagctattgatttttacagacagcctgttctagttaaagtaccatgccatagatctgggtagaaaatagcagttcacccaggtaataacatgtcagactgctcctgctcttactcaatgttgagtcattttaaataagtaatacttcccaatttgttgaatacctttggttgattttaatagccctgaaaagattcctaaaatgataacattttacaataagtttttattggacctagattataaatagtgatgaatatttatcttggaatttttaaggaatatgtgcaatattccctaataaataaatgaaatttattacccatgtaaaacaaagtatgttaataccataaccacaaaagttatacatggatagttctattgtcaatagtgccaacatttacaatgcagtcttaacgtagtaagatttgctgtttattctagcaatggtgattgtattctctcactaaagtatttaagcaaagggggcattaatccctggtgtctacccttgatgtgtcacttctcagaggaaaaacgttttacctgtagtacagagatatggatggctaacttgaagagttaagaaacaaaagtggaaatctttcctctaaccaagcccaaggttatttgacagtggcacatgttagagaaagaaaggaactcactaaaaaaatgccaatctattttcaaaaacataaagtgtgagttattttggtgaagcttattgtgcaaaaatgcttagtaacatgaatacttagtagtacattctttcaaatgtattgtgctattaaatgtaacagattagaatcataatttctacataacattaaaaagcagctgttgtatttattttccgacaccaaattcttctcataaatatacaacatttatttaaaatctggtatacttactcagaaactgttcattgcaccattaattttcaaactataacctgaaggttatcagatttttcatcattactattgtgaatgttatgtttagaaaagtcgcatgtcaaaaatattttataaatgtagatggtgcccaaagattttaagaaatatattgtgaccaaaattttagcatctctgtcattacctaccatcaatttcaagtaacaattgaactaatatataaaattaaaagaaacatgttactgagatatgactacaacaaaagatttcattttagaagggaagacaagtgtaagtaactgctggacagcagactgtgttctctcctacagaaattatctttaacaggtgggaattgctcagtgatcaagcacagctcatcaaaatgttaataacatgacaagaggtaaatgtattcatgagaatattaaaaatgtgaaacaatagcatttttacatgcagctcaatgtttacatccaaataagcctaatcatatgttaaatattgtaaaatatatttaagtaatagatatatgaacattaaaaagtgagataatgtcagaaattggcaaataacctgatcatatagagataataaaccagggtaagtctgagagatatttagaaagcagtccatagtccaatctgatttctactttttggaggctcagtttgtcaactttctgggtattgacagaaaagggggagagtagaattcaggagggcagacagaagaccactggactagacaacaggcaatcttgcttaaatttaggattgcaggtggagaaaaatggttggattgaaaatatgactttgaatatagaactttctgataggttaaatactgggatttataccacagtattagaaaaagaaaggtgtcatgatagaatcataggtttttggttttagccacagggtcaactgatggtatcagttgctgaaacagaaaataccaaagaacaagacagattggggagaaaagattctaagccaactgttagtggcatgttaactttgagatgcttcttgacatctaaactgaaattttgaaggtttttaaagatagttaggctgaatttacagaagaggtatgtgcaccatcagctttatatttaaagacatggagatatggggtcatattgagagtgaatgtgtttagagaaaagcaaaggactgagtcttctgtcacatatttaaccactcaccaattggttaaaaaatgagaagtcaccaaaggagagtggggaagacattaaaaggatacatcattgaccttacctcaaggaacgtacatttataaagacagatatgtgctttcattactataatgggggaagctttgataagtgtatcagttgctgtatgtataaataaagtcctactacatttcagataagaaacatggccaggcaagatggcttatgtctttaatctcagctgtttgggaagccaagtggaaagattgcttgaggccaggagttcaagaccaacctggataatgtaagaagacctcgtctctataaaaaattaaaaattggctgagcatggtggcacatgcctgtagttctaaccactcttgaggctgatgtgagaggattattggagcccaggagtttgagactgcagtgagctaggattacactattacactccagcctggtcaacaaaggaagaccttgtctttgaaacaacaaccaaaagaaaacaaaaagaaaaaagaaaagaaagataacttttaggcagggataatttagagttttcttgaaatttctgctctgcttcttctcttctttcaaataatctgttctttcaagagtttcaaatgaatgaacaatgtgtcaatgaatgcaccactgtccctcataatctcctttctccattcaatgctggatggtgcagtgtagttacttcttacacatggtcaaatcagtcattgactagacagtgtcctgtggttttgcatggaaataaattgagatttatcccagttaactgaatcaataagtaaaacagaatgatgaagaaaagtagagtacagtcgatttatgttaatttcagatgctggtgttatattgtatggtctcttcctgttgttttcagtaataccctgattcctaccctttctctgtctggcttttcatttatttctgtaattctgtgacatctgtctgcctctctatgtcttctttttttctttggagaatttgatgttctatgccccttatatcaaaatgaatccagtcatgaacagggatcaaagcaagtcttattaaagagaaaacaattgagctgggacacaaagattgaataaaattttagcttgcaaatatcatgctgtgtaaatgagttcatcctatctcatgatgacaatttgaatttacacagttttttaaactctggcagaagattagataatcatttaagtcagatggtcatattctagtttagaataaaccctctcttttcagtcgggtaagttagacttaaaatgtcagaatgtattttgttcctaatcaagtgtttcaatcattacccctcatcacgtctaccactatgtaaatcaactcatctctttacttgcataagttctttatatgcaaattattatttcattcattaaaaagttactttcacttattctctgtgtacaatagtttgcactgtaacccatgttgatctacccttatttctgcaaatactatatgcatgtatttctctttcagacactcggccctgatgctttttttgtgagggcttttcctttttcctcttggatttccactaaaagtagttgtaacattgactgtgttcttattcctctgtgccattccacatcatcaatccgtgtttctctttccttattaatatttaaacttcatatcctgtgtctctcaccctttttttttttttttttttttgagacagagtttcgctctgtcacccaggctggagtgcagtggcgtgatctcggctcactgcaagctccgcctcccgggttcatgccattctcctgcctcagcctcccgagtagctgggactacaggtgcccgccaccacgccaagctaattttttgtatatttagtagagatgggtttcaccatgttggccaggatggtctcgatctctttacctcgtgattcacccgcctcggcctcccaaagtgctgggattacaggcgtgagccaccacgccccgccatctctcaccctttttaattatcgtagccatctactattgtcttgtatgaccctgtcaagatgtatacatagagatgtataagctttttctttacatgatcctggaaatcatcttcggtgatgttaacatctatatcaaggattcttctgagtctttgattataagattcttcaaactttttaagaggacagaattttatctcccttctagatcatcattatcttaactattacatggcaaattgtgtctctttcctcttttttctacaatattaatgctatctgtcatctcccttattccaactccctcctatacactaaacttgcttttgtttcaaaatgattcactaatcaatcatattctctgactttgccagttattttaggcaacttattcattgtgttttttcctaagttgcatagacattaaaatataaatgctaagtaaaagagtatgaaaaaaaactctatggagaaaaattgtcctaatacaaccaaacctatgctttttcaatgcagacagcccagtcccaaaaaagcacctgaagcttgttttagttttcattcttcttatggtaagaatacctcaaagacaatgaaaaagatcctcaaagcaatgaatccaaggaaagaatttcataaagttgcaagatattgtatcctctgtatgtaacacatcaaaagtacaaggtttttctagggataaactggagctgtcttcagaggcctctttatcagggatgcctgaatatctcacatgtacaaagtagaataccaaagggacacttggttttgtgcctgtagcaggtattttttatctagctatactttattccaaactccatatattcactcatctctctatctagacttctgttgaccaatggaacttcttgtgaggaaagatacattttacatcttcgttgtgctatgttatccaccaggccaatatggctattaaaagaggctagtggactgaacaattggatttttagattcatttaatttaaactcaaatagccacatgtagctagcagttgcagtacacagaaaagctctagaggtattcacttgaaattttttgacataaactgagaactttaaaaacacggtcagtgctaccaaatgttattttctctgccaagcatcttacaacttcacctatatatgtggccttttgtattttctaacaagttcagaacttgtctatcagaaataagccaaaataatcgacaataaaaaaaatcaactttaccttgactcagcttttagtagtaatctttcttttttttaacttttaagttccagtgtacaagtgcaggtttgttacacaggtaaacttgagtcatggggatttgttgcacagattacttcatcactcgtgtaataatcctagtattcattagttatttttcctaatcctctccctcttcccacccttcaccttcttaaagtctacagcacatgttgctctcctttgtgtgttcatgtgttctcatcatttagccccgacttataagcaggaaaatgtggtatttggttttctgttcctgtgttagtttgctaagggtaatgacttccagctccatctatgtctctgcaaaagacataatattggccgggcatggtggctcacgcctgtaatcccagcactttgggaggccgaggtgggcagatcacctgaggtcgggaattagacaccagcctggccaatgtggagaaaccccatctctactgaaaatacaaaaattagccgggtgtggtagcacatgcctgtggtcccagctgctcaggaggcttgaggcaggagactcacttgaacccgggaggcagaggttgcagtgagccaatatcacgctgctgtactccagcctgggcgacacagcgagactccatatcaaaaaaaaaaaaaaaacaaagacataatatcattctttttatggctgcatagtattgcatggtgtatatattcttattttctggtgcaacctttaaaaaaattgacttctgaccaaatctttatcacactgcaatatggattttacactagtgtatttcttatgtctaaaatatcttagaatgtatttgtataatatattggcaatctagatgaatgagatattgtttatgcctctgaaaaggaaagtggtgatctaaagagacaagacaaatttccttgggactccatatgtttgattttgagtacctgatattattactactctgtgaaatctaagtctgtcttaaattctgtgtcagcttctgagcattgaacttttattcttttttttacatatcttaaagttactttgaaagatgttagatataaaatacttacagttatgacttcattttgtattattaatactgattatacataataaaaagggtggtatagaacttaatattttacttcaaattcataatatcatgaaatcttgaatacatgtgagataaatgatttgttatttagttcttaatgtatgtttatgtgattacaataggcatcccaacccatcaatgataggcttagtaaagaaaatgtgatatatatacaccatggaatactatgcagccataaaaaggaatgagatcatgttctttgcagggatatggatgaagctggaagacatcatcctcagcaagctaacacagaaacagaaaaccaaacaccacgtgttctcactcataagtgggagttgaacattgagaacacatggacatagaggggaacaacacaccagggcctgtgggggttgggtggtgaggggaggggaacttatgggatgggtcaatagatgcagcaaaccaccatggcgtgcatatacctgtgtaacaaacctgcacgttctgcgcatgtatcctggtttttaattttagaagaaatcaagaaaaaaaataaaaactaaaattaaaaaaagaaaaatcccaaaatttaaaatgaaccttgaatagataaagcaaagcattccaagccaagaaaactgcataaggacatgaggataggagaagtgtgtatacatatatatatacactcacacacacacaaacacacacatatatagtggaagtttatgcatatgagcagaatgaaaatttagacttgaaagatacctttgcaaatttaagacccaattagtactttttaaatttcctaagcttaatatgaaaattaataattatgtttttctatatgggataagaggcagattttaaatgagaaggactgggtctgagtcttgggtatgttttgattagttgtatcatttccatttcctcattagcaaaatataaactataataatgtctggcaaacccatgttgcattattgctgccaggatcatattgctgtggggttgaggtacaacgtacatctcctcctctttggtgatttcactgataatgtggatttaaacatctttaacaaactgggaaaggtagtaaagctttatatagatggtacttctccccgtacctcctaaaatgttttcttgatactttttggagagagaaattgggcctgatgctgaaggagaactcttctgtccactgcaagtccacttacatgagcagctaaataaatgaatgggattctgaaggactgtatgtggagagcaaggttaaccatttgtgcttgctgcatgaggtgagaaaatgcgaaaagagaatgaggaaatttcagctgggtccctccctttaatttagggtttcttcccactctccagtgaataagcaacgatgagtgttaggctgtttattcagataccctcacgccactgcagaagcgagtagaggaagaatacaaggaaaaaagtgtctcccagcctgtggaaagaggatggctatttcatccactaaaggtattaagcagaaatgtgagtgaaagattctgtcattcccaaaaatgactaaaataatataaaattctagaaatttaaaattactgagatcttaatttattatctcataatacataagcaaaaataatataatcatagaacttatagcaagaagaaatatatatcatatcatagaaagaagaaattggtcctacctcttttttttttttttttttttgagaaggagtttcactcttgttgctcaggctggagtgcaatggcgcaatctcggctcactgtaacctccacctcatgggttcaagcaattctcctgtctcagcgtcccgagtaactgggattacagacatgcaccaccacacccggctaatttttgtatttttagtagagatggggtttctccatgttggacaggctggtctcaaactcctgacctcaggtgatccacctgcctcggcctcccaaagtgctgggattgcaggcatgagccaccgagcccagcttgtacttacctcttaaaagaagggctagaaaatatcttgaaaaataggcaaagttatattgcagggacatacatgtgaaaatccgaatggaaagcactgtcttgtcagcataccagttcaagtattcacttttccccaacatatatggatgacatttgctaagtcaaccagtgctctgagttttaattttttgttagtaaaatgagagtattttacattactatatctgagtatcaatctctctctctttgcttccattggaaatccctaagtttgcagctgtttcaacagctgaaaatgtctccaagtaccctgaataatgacaaatatttgattaagcggtagagatcacactgcatatttatctttcttctatttccgcaataagaacatgtttgttaatgactatgggcagtcttgaagagaaaagaagttaatagaaggaaaactgcagaaacatgccagagagaaaaaatgtagacaaaattgataccactggtgacagtgggaaagggagtatggcctaaaactttctttatatcaccagttgacagcactgctttatgcaacccactaagactttagaaatgactaaattaatatctagttagagttaattttgataaattctaggtattacctattttatgtagcataagaagagtttatatagcaggttctcaaatatctccaagtaattgggttttctcccacatcccaaaggtgtacactttaagtgaattggtatgtctacatcatcccaggaggagtgaatgtctgtgtgtgtgtacctgagataagatgatgtcttgtccaatgctggtttccaccttgtgccctgagctgttgggagaggctcctgcgacctgtgaccctgaagcagaataagtggactgaataaaggaatgatgcgtataaatgattgtaaaataaaaatttgtaaagtagattataattacacaagtgcactttaataaacaaggtggaatcaaagcacacagtgaacgcaccatgtttgtgattatttttgaattgagtgctggatggagatgctcctgataattttcattttccaaacatttattcttggttttaacccaccaccactaaaaccacagtcactgactgattcactgaacactgggtaaataattatcatacttgtttgtattaatctttcttatatatatatatagctcacatttattttacactttatattaggagggctggaggtatttatttagaagtttggagatgtttttgtgacaacaaacatgctgtaggatcttaactcttgtttatatctattaacctatggtacaattggttttcttacacatcgttttgcttaaatttgtggtttccaaaaactatggacgatgttatgcgaggacttaatgcatttcaacactgcctgggtatagatgttgaagttgagtgagtggggattatagaaaactaatacaaaaactataaattcagtgttcaacataaatttggctgggtgaggtggctcatgcctgtaatcccagtacgtgggaggccgaggcaagagaatcgctttgagctcaggagttcaaaaacagcctggccaaagtgccaaaactctgtttattaattcattttcccactgctataaagcactgcctgagactgggttatttataaaggaaagaggtttaattgactcacagttcagcatgggtcaggaggctcaggaaacttacaatcatggcagaaggctaaggggaaacaaggcaccttctttataaggcagcaggaaggagactagccgagcaaagggagaagagccccttataaaaccatcagagttcatgagaactcacttattatcacaaggccagcataaggacagcatacaggaaactgtccccatgattcagttaccttcacctggtctctcccttgacatgtggggattatggggattacaattcaagatgagatttgcgtggggacgtaaagtcttatcatatcaccctgtctctacaaaaattcaaaaagtagccagatgtggtgacaagagcctgtggtcccaactactagagaggctgaggctagagaatcacttgagcccaggaagtggaggttacagtaaccttaggtcacaccactgcactccagccttggtgacagagtgagaccctgtctcaaaacaaacaaacaaaacccacacacacatgaaatcaccagaaaaattggatgttatgtaacttttaattcacttgctaattttttctataatgtatttgttataagtgatacaaaatcatcaaaaacatgtttgccagatttgacttcctggtcattttattgtaaatattcagaaacgatttccctgtttactaaatctcatgcaatcattcaacttcttaaaataacaaatcttgaacacatgcaatattgtaaacatttggtatgttactaaggacttatcaaatcttaaggcatacagagaacagatttcattagtggcagagaaagaaatacaaaaaaattaagcaaaacttgacaatgtaggaaacccagataatatcctttatcatcactagtccaaaaacatctgaatctgaagattccattgaaaatcttttattaattagatgtggaaaatcagttaaatgtgtaaaaaataaagaattttcaataagaccagtttatgttgctaaacctattcttgtaggtgagtttagttctcctcggagaaatgagctgagggcccaaaattgtaactcagtgaattacaaaattgttattgtttcccaaagtattatagtttcacattttcacgttaaaatttcttctttttgaagatatttgttccctgttacctcttaaatgttctatttatatcactctctttttaaaattaatcacagttcaaaatcctgcacctggttagatttattcaattaacaaaataccttattttaaagtgagcaaattagctcagagtctcttttccaatcttttcactgattgatttgttaaatctaattacagagttgtgcctttatttggcatgaccatataaaagcttatcctggaccccttaacaaacatattcaatatataatgaccataaaatatcacccatttcctgtgaccttaccttttgcatggcagatcaggaggcagacataaataatatgagactagagtcctcattaagtaaaggtacagttctgtttattcagttttcatatgggtttatacaaagtcatgtgaaaatgagaaccgccaaatcttactttcattggttttgcatacagcatttctgttcataaatagaaggagctcctgattttaaaaatactccatgtaattagcaggcatttaatcacactcatacataaagtatgagtaaggaattgaataaacaccaaagttaggtgtagtgggttgagatcccacttgtcagctataacagagaaagcctatgatatttcataagtttgcatgtactgtctggtgtttttggggccaggaatccttggtcattacaggggtctgctgcttgaagaattacctgatagactggtgagcaaaacagacatataatattataaaccatagctacattagcagcttctaagatttcctttaaaggtaaatgggttttgcatctccgatataaactccctagagaactaccatatttaaatttttatattttataaaatgctatgtcaaatttcaatttaacaagatttttaatacacctcacggaatattttactctagtgacgccaataaatagcaatacgaccctttgaatgaagaagactgtttttccacttaagctttctacttgtatctacttttttcattttatattatttgatcataaaattatttaataaccctcaatagccttcaagggaaagtggaaacttctaaattagtgcttatggtgaatagtgatgtgacatttccccaattctagtttaaattctactattcactctctttctttggaataagtgtaccacttactccaaataaatcaatcaagttatgcttacttgaatgtaaatggtcatttacatttacccgtagcttaacttctatcataagtagctactcaggacatgcctggcatataaaatgtaccaaattaaaatcagtttttggggtgccgtggcccatgcctgaaatcctagcattttggaaggccaaggcaggagaatcacttgagcccaggggttagagaccagcctgggcaacataatgagatctcacctctatgaaaaaatttccaaaaacttcacctggtgtgctgatgaacttccatagtcccagctactgaagaggctgaggtaggagaattgcttgaggcgtggaggtccaggctgcagtgaggtgtgatcacgccaccgcacttaagcctgggtgacatagtgagactttgtctcaaaaaataaaatagtttttgattcaagacacttttaaatcattttggaagatgcatagatatatgtattataattatacatatatagaaagagattgatacacctacagagatatgcagattaaataatgttaatgtattatttccctattgcttttctgttgtctgtaacaaattactgtgagagccgtggtttttctcccgcccctcgtgaccagtgaacatggcttttgcatgcagtgaacatgaccaggttcccaagctgggaggggacagggcatgaatttgtcaagttccctgagtgcctgtggatgtgggggtggaaacagaaccatgttgttctgatttgcacctttgatggctgagccaaatgctcattctatttagtattacagccgtaatctgtagcaaaacgcttagcattataaaggaaagatcagaaccatttcaaaccatgagagaagacaagacaccaaaggaagtctggggttcttgaccaatggagctcacccttggggccttccagcaaaagatgccttcagttgccccggggctttactcccgacccatgtggtagttagacctccccgaaaggaaacagagcatgaaagagagaggtggcagggtcttggaaaagagacagatccgacagttttccatttcaactcacccttctgatgaatatcccagatggagcccccagatgaaatggccacggcaacggccacgacgggcgggggaaaaaccacagctgccactgggagcctgcacggttggctggctggcgcttgctgcccggtgtgccagtggaactctactctggccaaggaattcagctctgtctgaacagaggggaagcatacaatgattaaggagacacatttgcgctgagcaaggggttcttcccccaggaccttccccttttgttccttaaactgttttctcttgttttccttttccaagaggttttcttccccagcacgctgcttctgttagggaagttaatggagaagcgacccctactggctgataactgcaaatttagcggggctcatttgagatagttgattcatgcagccacttgaaatacttttgagtcccaaacttgattacaagcttcaggctgaggccctagaaaggaaaaccagatctgagggatccaaagccaggcaataggcacaatgtaaatggacaggaccaattcctgctgaccaaagcccccaccccacggaaacaggccatgctctgtggcgtaaatgagacctaggaaactcaaaggttgtcaacagcagggaaagatggaggcgaaggtaaggtcagaaaattcctgttctctacgctttccctgttttatgggtgcatgctgcattggcacccatgagcagtacctgccaaggtcacctggacacagggataaaaagatggaagagaaagggagggcacttgttttctctctccacaccccgaggttcgctgaaagaaggaagggaagtgagggacggctctatagcctatctttcggaatgagtaaccagctctcttcaccacccccagcttgtactcttctggaatgtattctaaaccattggaactgctttgaccctcagaatctggaggaaaaaaaatgtctcatagtcctctgtacaaagatttggccaaattatgatttatagcaaggactggcttggcctcaggaaggaaccatttatttcaataccatcctgcaattggaccttttctgtaaacatgaggactagtggtctgaggacccatatgtgcaggctttctatatcttgcagggcaatcctgatctttgccaacagtgtaggattgatccagccctcctgtttgccacttcgggagaggctaccaggggcaatctcaagcaactaaagaaagaaaccccagaggttcccccagaagaggagccagctccctccaaccctgctccttcaggtcctccccaacttccctatccagcttcagcctctcacatttcccctccaagaaattctcaccctagacaagccccagtcttactcttgcctctgcaacaagtgcctggtgaatttggccccagtaaggtccagaccccttctctttataggacttaaagcaaattaagggggctattgacaagtttgtagaggaccctcacagatatatagaggctttccagaatttcacccaaagatctgaactctcctggagagatattatgttacttgtgaatcagactctgatgcatactgagaagcaagccactttgcaagtgacagggagatttggggaggagctttgtataacatatagcatcagggaagacggtgaacattatctaactggtagagaagcagtaccagtgaatgaccctggatgggatcccaatgatgagatgagagactggaataggagacacttctaggtatgcataatcggggtcttaagaccaggatcaagcctcccaattatgctaaattgtccatgatcgatcagggatttgatgaaaatcccactgccttcttggaatggctaagagaaggcttggtaatgcacacctctctgtctcctgattccatcgagggacaactaatcttaaagaataagtttattattcaggcagcccctgatatcaggaggaagttgagggaacaggccctgggaccagatagtactttagagaaccttctgaaagtggtcacctcggtcttttatagtaggtcactggaatggattcttgaatttattatacccaagtaaaggcctgggaaatggatggagccacttctgtcaacccagaagagtacccaaagtaccaacgtgaagagatcagggacctcgagctaaaaatcacaaaagataagtgttaataattaaccttccatggacatcctctatatagtcttggctatgcttgctgttcttacctttgttctgttctgtatcacggggcacgacagtgttttcagaataattaatatatttcacttcttatttctgtaattgttggcactaaattctttccttgtccaagacgcatgtttaacctatgcatacgtaactttataaaaatttgttttgtttcttctctcacaccgagaggctatcgaactccaaacggtcaggtaaccggagcctcggacaatggctcccctttgccaagaacccttaggtagaactctggaaggaatctgacttcccttttccccaaaacaacgttccctgtcaacatgaagtagctaagaccggtcgttgtctatattctaacagcagttaggtgtgcctcttcagagggaggaaatgatacgggaggagggcagggaagtgctgggtagagaaggtaagagtctctggtgagagcgccaccctcgggcctgtgcctgcggacctaagtgaagacaggcactcctgttttcacgtctgaatgttgcattttccaagaccactctggcctgccaagcgccccatactgtgccggtataaacccgagaccttagcaggcatacacacaagtgactgaacaccaagaggagcagaggaacagagcatcagggaatggcaaacagtggcagaggaaggagagaagaagtgtttgaaggtcgagggaagttcagccattcttgaggaagattatctccccgcaactccaccttcccactccagatccctaaagccacctccactacttaataaagtctccacattcatcacctttcaaacagttcatgtgagctgagtcgtccaggatgctggacaaaaatctgggcgggaggtggttaatacttacccacccgcgggcagcaaggcttgaaacacacacctacttgggctttggcatctatccatctgcatactcccccttccctcagggtttgagattcagggcaacccaacaggtgagccacacccctgttgcacgtcctgtgaggggaatctgggaactctaccagttcattatgcatattttaaatcaaatagctcagctattgaattaaattaaatgacacatgttttgggttgtatttattagtgttaaattttaattttttgatctcaaggacaatttgttatatattttttaatatattgattatggaaatgctgaattagctgatttattttcaatgttaattaatatgatcgatgtcaaactatctactgatggtctccgccatttttggaagacaaatctaaccctctaaaacttaataggtagatattttaattacaaaaaaatccatattactgtctaaacaatagatagaccacaactggagtattttgctgtattagaagcaatttcagtttatgatcttactaaagaaaaataacctattgctaggatttaagctgtaaaagtgcaacatatacttatctctatttaatgatcattaattttataaataatatttatattaaaatgtaagccatgatgtttaaatttaaataaagaaagaaactatattactggtatactagttagggttctctagaggaacagaactaataggatatatgtatatgtgaaagggagtttattaaggagaattgactcacatgatcacaaagtacagtcccatgatatgtcatctgaaagttgaagagcaaaaaagccagtgatggatcagtacaagtcccaaaaccttaaaagtagggaagccaacagtgcagccttcagtctgtggccaaaggtccaagagtttctggcaaaccactagtgtaaggcaaagagtcctaaagctgaagaacttggagtctgatgttcaaaggcaagaaacatccagcatgagagaaagatgaaggccagaagattcaataagcctgttctttcatcttctcctgcctgcttttttctagcgatgctggcagctgattagatgacgcccacccagattgagggtgggtctgcctcttccagtccattgacttaaatgttaatctcctttggcaacaccctcacagacccaggaacaatactttgcatctctcaatccaatcaagttgatgctcaatattaaccatcacaactggggtttatgtaatacgtagaatatttgatcgtttaggctgctgacagaatttgtgctgtgtcagaatccgatcaatcaattaactgggaaaagaaataacaaattttgcaaaaattttaaaaataataattcataatcaaataaatcatatcccaatcttgttttccttagaataataaaatatatggcattcttggtatcagtttcctatttgtgaaatatggaggtaggttaatttagtacttcaatttcttttattttcaatatccttattccaaagtgtatgaagttatatttataatcattaaaaatgaaaacagtttgaaattgttatatataaatatgtaatatataatatatgacatcacacattaaatgtaaaatttaaaatgtatcaatcattttataaataaaattatatgtttcactatgacagagtacaggaagccttagaagatttttcactaaattaaaaatactggttttttagatattttattattcaacactaaattcatatttcatgggttgccttatagtgagcaattattgtctaagtgcatagccaatcaggtttccgccagcatgaacatcatgagtgaatgtatgcaagttaacactgattgatggttccctaaagcaaggattgactaactatggctagtataagccagatcatgtctgatccctggttttgtaaatcaagttttattgaaacttgattcaacacgcccagttacatgcctattatctcagatgcctttcacactacaatggcaaaattgtagtagttgcaacagaccatattgcctgcaaagcccattatataaaatagttgtcaactcctttgagagtaatgaagaactaaacaaacacagaaaacagtaacattgaacaacaataagtaaaatgccagagtgagtatgagtaacaaacagaaattgagaaatgaataagaatgtgcattttgtacaaagcgtttttctgaattgagtaaattaagtagatttcacctgtagagttacataaataaaaattaaatataaatatgtgtgtaatatcaatttaataaacagtctgggtctatgagctttttcccattgtccatgagctggaacaagcttagagtgaaatagttgcagaactatccatgaggcttgatggttaaacactatggccaacacacaagtggttgtctacatcaaatgtacacaaatgagttctaaacctaaatgactgacatggtatctctgaaatcattaaattatttaaaaccgtgtaagccccaagaactttataactgtaaatgtcaagaaaggtccctggcaatagttgtgggttctttagggcttttaatgacttttcatcaagggcagctcaacctcaacaagtaaggtcttccgttgctgaacagaagcaacagtttctgttgttttaattaaccccattggtttttattatagatcccttgacaacagtttgatttaggagttgcacagggcctagccttgaggatccagtgtccacactattggcatcctttcttaagtaagaggaagaaatttgaagctaatagactccaatgagacctactgtgagttcattctgtaatctatttacattattttgtttatatttatattatactatttattatttttattatatctgcataaattatatattatatataaattatatatataatttattattacattttaattatattatttcctttcttctatattgggaatctaataacgaatgatatcctgtaaagttactcttattgaaaggccacattagtttgcgtttctacattttttattaactgtcaattctatttgtgaagtccaaactatgaataacaaagcataaatcagtagagaaaagcgaaaagggttcatccccttccacaatctagtacatactgtgacccagggaaaggcagtgattattctttaaaaatttagtggtcctatcagatgagacgataatacttatttcatgatttctgaatagtcttttgccttgaccacctataatatatgagaaaaaagaaaataataaggaaaagaataggttaaaacatggaaaatgatttgctttttagtggaattgacatatcatttttatgcaaatgtgtcttccctctttctattctgtgagctatttctctcacaaaaagatttttagactaattgttgtatctgccacttgctaaatctgttttctaaattacaaattcagccttcgctgcgggtgtactgccagccccttctttcacaaaagatctttgtactaattgttttatctgctgctggctaaatctgtttgctaaatatacctttcattgaaataacaacaaaacctactcaggaagcaattagcaggtatggacatttttttgaaaaaaagcggagcttatatactttagattgtgtaggagggcctgaaagatagatgtacaaatcatgtatcagtcaagggattacaggactttaagaaggacataatgttacttcacaaatgtgttttccaagagtttacaaaagtaggtcttgatactcatgtgcctaaaaccatgtaagtatgatatgagactttttatgtgctattatcaaaaataaaattttaaaatatgtgttctgaatcttaaataatgttttgccaaggttttaagttttcatggattttcttctctaaatcttaattaaaatttgctgaatatactatagttttgcctcagaaacagacatataaagcactatgcttctaatggttaaaaaagacataaaataaaccaaaggaaaaatgagcttttattatcattatggtatattaccatgttgaattttaaatttatgaactaatatcaattttctctctttaaaaataatatgcataaaatttttccttcttaattggtttaaaatctcaggaaaacaatcaataccaacatactgaaaaaaatttaggggattgctgaatatatgtgaagcaaattttatatagtttgaaaatgagtctctcatttctgccacaggcacagttgaggttgtgagttaaccatgtgatttactcgattatgttgatacttctgtagtgtttcgtgtaatgaaatttgcaaataatgtgaattttctcattccaactgcattttactaatagcagaaaattttctaaatttcaagataaaaacagacttctaatgtgctagattctctttcccagtggaaatttgttcaaaatgttgttttagatttgcttacaatgttgttttaaacctgtttaaaattttaaaaccatatggacaatggttttactcttagacttttaaacaatacggttttatcatggattcccaaagtatggtgacaacttctatcacaaaatagtctatatctaaatagaaactgataaaaatggaataaaactttctctattagagtgtatttgcttgtagcatgtttggcaacataaatggtagaaatataagttaatcagtgaatattaattttaaactacttattatatatccgtgttttgggttatataaagaagaaatatgtctattatttcggaaacaatatcaataaatagttatggtggacagattaacaataaatctggccctgaatggtactagaaacgtgaatattttattgatgctcaggaaaagaaaggcagtataaataacaatgttttaattttacttctgatgaaatatctgaaaatggtaattatttaacttagagcaatcaaaataagaatattgcttactccgcaatattctccattgcaattttagaagaaagatcaaataaacacaaacacacttacatgtgtatgagtatatacatacatataattttccacctaatttgcattttactaaaatataaataaatatttttaaacatgatattctatacacaaatgctaatttaaaaataaatgacagaattgaaatgtagtttttacttgtgaattaaaatataaactgtttaatattattagtaaaatattattgttcctgttttttattgagcatacaatgatgcagctttgatttatttaatattcttttgttttgctgatttttatctgtatatattattgaattttttttttttgaaacagagtcttactctgttacccacgctggattacagtggctccatctcagctcactgcaacctacacctcctgggttcaagggattctcttgcctctgcctcctgagtaggtaggattacaggcgtgcatcaccacacctggctaatttttgtatttttagtagagacaggttttaccatattgtccaggctgatctcaatctcctgaccacaggtgatctgcctacttcggcctcccaaagtactgggattgcaggcatgagccaccatgcccgaccaagacattgatttttttattaaattacccttaccaggacttaaggatgccattttgtcatttattctaaataacaagaataattgtatgcacaatttgttgctcctcagtatttatttttattgatataaaatttttacttttctcattaaactaaagtgaattcaataattagagtatatagttatgaacatattatcaatattgcttttatgtgtatttataatgtattaaatattaagtcataaaataagtccctaaaaatctttttattccaaatgtttagtgtaaaatatattttaattttcacctgctctaccatcagtttagtaaaaccactacctagaaaaacacagggactcaatgtttggcacatctcattgccttgtatttttttttctttttttggtttggttttgtgtcgtcttccattcacgtgctctgtttgaaattctttcctcctttgtaatctgtaatagaatctttcagttgatttttattctaaactgataacaaactggatttcagtttcatttgtgaagtattcacatcctaaatataaatgttttttaagttgtctcattaaaaaaatcattttaaagctatcccctagaaatcacatactctaagatttttctgtacagatgcttatatagtctaagtcttctgtatttttgctcatgtctctgtaatcaagtcccatattagcaatagcctgtaggaatattcacatgcttactttaaacttaacatgctcaaaatagaaactacagtcatttcttcaacaacagctcctatagacgtacttattgaagtcatcactagcattaacatataaatccatctttctgtctgatggttgcagcatttagataatttcaaggtctggatgtgctgactactttatcttttaacaatggctattttttctaacttttttatgtaacacatcttagattttagaatgaaaattatgtgcaaatgaacagtggagaatgaggtaaacatttatgttttgaaatgggtctgtcctttcttttgtcaagtcgtaattgtaaagtatttagtcactgttgtcaggagttgagttgggtttgggttttgttgtggctacatttattacctttatactgagatgtcaatttcctttcatcttggtcagctggtaccatatactggatgtggggtctggggtgctgaagagatttttgtgttcctaatctactttccgctttccgtaatttctgaacaagcctgtgccacagagagtgtttatatatcattttgtcccttccacaataaacagtagactgtcatttctgttaatgggtgcaggtgtcaaagtggaggtagggttggttctgtcttccacttcgtcagcctcattgacttggcctttacaaatggagctttttcagtgtgacttatgacagccattatctgccttgtgtctgagagagccttgggcaggaacagttttcacaacttaccatgacaatactgatctcgctttgaatcagtgctttgaatcaatcaaccccagtaggcttcttgctctccaccagagactgccaggttttgggtctattcctccctcagaggcagtgcaccattgcctgagactaggtccaagatggtagtatcctgcttctttcccagtgatattgcttatttgtttgtgcaaagcttgttgtgacagcagaggtagtttgttatctcttcccccagaggtagattgcttctacttctacctagaggcagtggacttattctacaacgctgggagcagaactgtttcctgcccataatggagctgtttatggcgtttacttttctgagagaaaagttccagaacatggtcagggcttcatgtcactgtccacgtttgtcagttttgtgcctttgtccaaccaaaggttcctctctcagctctttgccctgcatgtagtttatctcatgagtatctagaggtgaaaaagacctcacaagttagtgtaaactccattatgtctgaggctcccactacgctctcttacttgacaacatttgaccctgaagaatttgtaaagttttcattgttttcttctttcacatttctagagcatgaaactctaaagaaagaaacacaaagtccttggtaccatgctccaccttgtgtttcttggagaggcttggcaccttggttcacctggtaaccttggaaccacagcttcctgactgatgcacttgagaaatgttaggattctgttgactaccctgttgccttttgtttgtttgtttgctttagggtggaagcaatgtctacttgcggctttccaccttctaagtggaagcagaacttggttgcaagtaattcatttaggaggtaattcctgcaaacaatgttgagtgaatgggaaagtgagcagccggtggaaggcaatgcaaattgcatcagagaataggttgtaactgtataactagaaacctctgggagactgtgtagtgcttgtctcagagctttcttacctgaaaataaaaaagctggggtactcatccacttagtattttctccatcacttccatcttcatcaacttatttctaaggttattctgataggcaagttatttattggaaattatgaatttaccttcctaccatttatctggctgagtctgattactttgtccttttgcttttcttcgaaactgttataattttcataattctaaccaatttatgtattttaacatattttagcgtgataggaatttttgagaaattaattttaataagcatatatcaaatttactttgcatttatatatcatataatatgaagttaatgtttattttgtcttataatgaatgatttatagaattctgggagtatggatggattctcgtggtaatttacatatctctcttaatacatcacctgtgcatatcagccctaagaatataagtaaacctctctgagcccagtagagtttatagtttcaatttaatctagtctccacctactgtaattaaaggccgtaactggaaatatagtcattgataaatgtgtgctaggaaaagagggctgtgtctgctgattgttttgtaattaatcaccgtggtgagaagctacaatattgttatactcaaatcttcaggtatgatcttcagctaaataatatatgactccaaggatgttaaataatttaatgttcaaatgatctatttcaatcaagagttatcacaaaagccaataatggagagtgctttcaaatcaagagctcaaatgctaattagaagatatgcaataagagcccagaaaaaagacgattgcatttggtatagaaatcatgcaaaagcagttttcatacagttacgaggggtgaaagggcttccagagagaatctgagacaagtgattaagtagaagtgctatttcccctgccatgaatggaaagacagaaatggaatggcagccagagtagggtgtatttgagtctttgcttgctatttcctctgagaacagctagagcatatttatatgttgctgatgggaattttccagtgaaaatggccattgggaattaatgacagtgggggggggggtcgaaatgctgaagtcaagtttttgcaaaaggtatagagtgtggaaaacaaaaaataatttaatgaatgtgttgtccttacataagaacaataagaccatagtaaacacatcactttgtaaaaatataaacatacatattatcactacaaaagcctaggttgatgatttgaagtgtgataatgaacaagattcgtttgacagctcctattttctcattaaggtaagaggccttcggaaaaatgtatgcgtaggattactggcatatttaaagcacattttaaataaaaattatatattttacactagttcttcatatgatgagagctttaaaaataggaaaatatttaacaagataatacttatttttagtctgtgaaatcatttcctgtaagctctgaagcagagataattatgttccactacaaaaggagttatttgctctcctgttaatgtgggtaagagatttccagggtttttgtaggtttcttattttcctttaaaagtgaaaacaaatatatagcatttttttcttagtcctcttactgaggacttctagcatgcccttggttatacaaatacataattgagacgtatagcagacacttcacttaaacacagattggttgtaggcataagtaatctgcaatatttttataaatcctaaaccagcaagcatagtcatatattcataaaaagtgaagcagctaagaaaacatgggcaacaatattttcaactaaaatatcatgcaacacgatggtttttgagtaattatcagagactgatacaagggaagtattctcttaatcagagagttttgattaatttaatcacactttcactgtgcctatgaaaataatgtctccactggtgttctaatttgaaacaacagactctttttattattgaatgaaaggtaccagtcataatgatagtattatggctgaatattcagtcctgaaaagtaatatgacagaaataataaagttgattaccaaaaaaggaaagtgaacattcactgacatatattcacctggcaaaataatagtcatcactagccagtgatggagaaagacattgtccaattaaatatactgtttttggttctgagtctgttgaatgccaattatttttgtcccgtttgtagatatatcacacattcggagcataaatacatttctttaaaataattttatatgtcaatatttatacattgttactatttactagattatcaactttatttccctccctattctcgactatgtttatgttgttttcatgttatgtcattaactattcacaaagctgattaaaataaactgattctaaaacagatttacagctatatgagtcacttatttttaatctagaaaacataaatacatgccctccagaagacacggtagtttattgacacaaggaaatgccggtgggatctttaaagtgtatgcagatctaaatccaggcacatcaaaacccaggtgttgaaatgctatgattcctggtgccccacctcaaggccagtggctgaattttgatgtggagaaggtattaactaaaatcgagtggacatgtagaaagcattaatttgaatttgggatgatgcatggagccaggaggcaaacaaaaggaagaatttaccttccagaatctctagactggcacaacacttaccaagaaatcacatgattgattttgtcctgttcttttagcacagtgaagggtagggtccccagcacccagaagtagcttcccactccttatccacgaatactctggttccctgtcaatggcttctaattcaaacatccctaaaggtctattctaaacagtatgttttttttccaagtcaaatgatcagaatatttcttcatgcattctaagcacatctagccagcaattatgccagacaccatgggaattttgtagtttgggcattctcatcaaacttgtaagcagtgacacagccaacagacttctcatcactgtgatggttaatactgagtgtcaacttgattgcattgaaggatgcaaagtattgttcctgggtataattgtgagggtgttgccaaaggagattaaatttgagtcagcagactgggaaaggaaacccaccctcaatctgggtggccacaatctaattagctgccagcgcagccagaataaaagcaggcagaagaacctgaaaagactagactggcttagcctcccaggctacatctttctcccgtgttggatgtttcctgctctcgaacatcacactccaagttcttcagctttgggactcagaatggcttccttgattctcagcttgcagacagcctattgtgggacctcaccttgtgattgtgttgagttaatactccttaataaattcccctttatacatatacatttatcctattaattctgccctctagagaatcctgactaatacaatcaccttcatcattgtctcatttctggacttcagcttcttttttttatcaaaacatgggagttcaaatctctatgtcattgaagatattaaggaaggtaaaactattctgccccaatagttaggccattgccttcaccaacagattgacaatcagctggctcttgtcagctttagctacacttattagggctgcgaagaattgctctgggctcttggaagacttaacaaattcaccttctcctttatcaagaaacaacttgctttctatagcatgtttattcctactatgaaaccgtgactaggagagaaagtccataaacatttttttttccgaaaaatctctcgcttggaaagtgggactaggtatgcttccttttgggcagtttcaaatttatttttatttctggaagcatttttgacctggaagcatcctctgcatgaaaacagaagttctcagacaggatgaaaagaaagcagataagtcagcactgggtttctccacttatgggcccaacaaatctttcaggaacataaaatgcctgcttagcaggtatttgagagagagagtaatgcttccttcaggcatagaaataccatcaacctgatccagtaggttcacagggacgattaacttgcctttattaactaaatgaaaacatttatctactagttgttatcacagtacattagaggaaagttgaattttgcttttatgttgtccattctaaacttgttagaaaatgacaactaggcattggaggaagctccattattcacccaagaagacaatatgaatttgcaggttcacaaaagggcatttaccctgagttgattattctacattgtatacatgtatgaaaatatcacaggtactgcaatgtaacctaaaattatgtgcaactgtgatattttaataaaaatctaaaaatgtcaaaatatccataaatatatgcaagtctattatctacattattattgcttaaactattggtgataaaacattatgtttgtgtttgtaattttgtcttttatttgcattctgttatggccaaatacttttgtaaaatattagaaataatgaattactaaaattaaaacacaaattcatataaaaaggcatttatgctgagaatgtccaatcattattactgtgcacacatatacagacacacacgcatatgtatttcaagtaagcctttaatatgcccatataattctattattttctttttttaactcaaatggcatattcatttgaaattgtatttcaatgatatacgattaatgaagagaagagattgtggattgccatatatcctatcatgtcccagaaggtagtcatttgtgactattttcctggcatatttattataatgccaatttttactctcaggagagtcacagtttagatgataaatagatacggttcgttgaagttaaggtgatgcaactttctgaaatgtaacatgggagaggtgggtgagttggaattgaccagattctaggattttctttttaagagtgttacattggccacattcatagagaagtgggatttaataaaactaaaaaacttctgcacaggaaaaaaaatagagtaaaaatgcagtgcatgaaatgggagaaaatatttgcaaaccatattatcaaaaccatgtatcatgtcaggagttactctccaaaatataatatatataaatataaattgctacatcacaatagcaaaacaaaaacaaacaataaataacccaattagaaaatgggcaaggaatttgaacagacaattctccaaagaagaaatacaaatgggcaacaagtaaaaaaaaggtgcttaacatcactaatcatcaggaaaatgcaaatcaaaaccacaagaacatatcacctcacagctatcaggatgattgttattacaaagaagggaaaaaaaaagtgttggtaaggatgtggagaaattggaacccttttacactgttggtgggaatgtaaaatgatgcagccactatgaaaaaccctgtaagtttcttcaaaaaactaaaaacagaacaaccatataatccagctgtcccacttctggatatatagccaaagtaattgaaaccaggatttcatagagttaacccacattctcatattccttgcacattattcacaatagtcaagatacagaaaaataccctgaatatccgtaagtggatgaatataaataagatgtggtagacatgatatggaatatcattcagctttaacgaagaaggaaattctgccctacatgacagcatgggtgaacctggaggacactgtgctaagtgaaataagccagttacagaaagacgaatactgcctaactccagttatatgaggaatctgaaataaactgataaacacagaataagactatggttgtcaagggtttgtgggaggaaaaaatgagaagttgctgttcaacaggtataaagattcagttatagaagatgtgtaagtttaaaagatctactgtacaatattgtgcctgttaacaatactgttaaacctaaaaaaaattgttgagggtacatctcatgttaagtgttcttaccacaataaaaaaaaattatctataaagacggttgagcctggagcgaagaaatacataacaaatcatgtctggaagcatttaataaattagggagtgtcagagaggtatgtggaggtagagaagatgatatagattttttttttcttaatttgataatggaataatggtcatgaaataagactagtgagaaagtaagacaacaaatctaccttgcagtcctcaggtgtaagagagagggaataaggaataccatttaggaggacttcaaaaaaaaaagatttccttggagaagagctaagcttcagttaaggtaaactggcagaacatagcagtttaaaataacagcttaaggccaggcgcagtggctcacgcctgtaatcccaggccgccgtggcgcgggggcttgtggggggggtggtgtcacctgagttcaggagtttgagaccagcctggtcaacatgttgaaaccctctctactaaaaaaatacaaaaattagccgggcgtggtggcgggcgcctataatcccagccactcaggaggatgaggcagaagaatcacttgaactcgggaggcagaggttgcagcgagcggagatcgtgccactgcactccagcctgggagacagagcgagattatgtctcaaaaatacataaataaataaataaaatgacaatttaagatattaccgtaattcctggataagaagcaccagttacaaaggacagtaaaagaattctcgctgtaggaagatggagataaaatgaaggaacaactagaaatgggagaagatagtaagtggaaatgctaatgcagtggatcatagatctgtatctctgcatgtgtgcttcgttctttgtattgtactttaagaagtcacaaatagtactcaagttgtaagaatattaatcatcttagcaaaagagtcttgcagtactgggatttatacacaacaaagaaacacatggggggggttaatccagctggtatgtataagaagtttataaaaattgaattaataattgtgtagttttgaacactgtgataatataatttgtacatatataagagaaaatccgatgagaatagagccatgacaaggctgaatatgtagcaaacaaggtgtctatgataacaaactctacatgtattaaaataaaatgatttcaaacaaaatgaacagatacagccctggaaacttccctgaggggagtactggcgggaatctagaggaatctgaatgagaacaaaacagagaatgatttattattattattttatctatttgaatgactttgtagaaccacatatttgtgtctgataacaccagagaaactgaaaagtttcttccaagttttccagtaatgaccatgaacttaataaactatgtagtgacatacatttgtattttgaacgatttcttactagttaataccatttcttgcagaatgttgtgtaatggtttagagagaaacagcctttttgtggcttctgctcgttgagctgggattcaagtgttcaagtcatccaacctcattttctctttccatgttattgcctatgaaagatatgttattgtttcttctgatgcccaaatagcagatctatgcatacagtgcagtgttaactgatttaggtagctttccatctcagcatataagtatcacttcagggagtaggagaatatggagttctttttgatggtacatgtgtgttaaattgatattgttctggtaatggcacactatagccatgaactctgtccatattaccctcttccatcaagaatggatgacactattcacagataaaagggaaaggatcaaaatcatgatatatttggacccagtagtctcttgaaaaaggcagggtagaggtcagaacacttatttcaattgaacaaagtctacattttcggaatgctgctataaaccagatgtcatatcagtaactgtcttgaaagaagtgtggaaatgtataacagctatgaaaagagatattcgtattaaaggaaatatttagaaacatacgcctgagatactattgtctttagtcttaaaaaattgcttaagtaaaattaaagtaactaactacctaagtgagcacaattttgaaagagagggatctctattgttatgtaataaattaagggaaagcaccaaatgggaactagaaggtagaaaatgttatcaatatatttgaatattgtaagtagaaataaaaatcaattagtcatattttaacaaaccaattaaagtaagccttaaagaaaaaaaagcatgtgtttaaatttttaaaggcaagtttctgacaaaactccctatatagaaggttataactttttttttaaaagtcacaatgtaaaactacattgacagccaaaacacatatattttaacatgtaaataaatctattacccatttcaacagtgatataccaaagaaagaactcattagccatttttcatagactagtcaaacatgttaaaatgctatcattccgtatttgcaagttggcctgtagaaatatactgaagatttttttaaaagaagattgaatttaattcaaataactcattttaatttaaatgaaactaatataaatcaatcatcataaaacagattgaaatttcactgttaaccatgctcataattcaacttacatttaatttagaagaaataatagtcaaatttgtggttatttaaaacaatctagagtttaatatagcgtagaatgcataaaaatttttttctttcacgctcattatatgactaaacaaaatttatacagaacatttctttagttctttattttcttttcgtgcaattttcatatttgtttcattgatttgtactgcatttaccaaaggataagtttttttagaagtgcaaaccatttaccattagttttggtatcaagaaaattaaatctcacccccttcactgtacttgtattcatttacccacagttgaaattgaagtaaaaaattacaatgttgcaagccaggcatggcggtgcatgcctgtagatccagctactctggagtctgaggcaggagacttaagttgaggagtttggagctgtagctcctatgattgtgcctgtaaaaagccactccactccaacctggacaatatcgcaagaatctgtgtcaaaatatcacagatacaattccttaaaaataatttactatgtcatgatttctccacattttacataagacttagagctaccttaagttaaaggtagcaaacagttatatcataactcattttcatgaagctttaggacttcatccttttatcactgcaataattttaagttataagtcattttttgaataatatagtatatttgcttattgatttttaaaatgcacgctacttgtagatttcttcttgcattagaaatgaacgatctggtgaccactggatgtggtaaatgaggaaaacttcaaaagtaactaataagtaatagattaacataataataataaaaccttccccatttccaaattccagtggaaatacttacaaacacagaccaaacataaatgtttaactatgtctatgcatgtgtaaatttggataaacactagtaaaaatattgataaaagatcatatattcagaaattggagttgtttctacatcttgattaaactaacaggggatactgttgactctttcaaaaataacagttttaaaataaggagcctacatttccagtttaagacaatgaactgatcaaatggttcaaaacatcagtaacaattattgcatacaaaaaggaatattttgaaaacgtatggaatagaggtgacagcaattgtccggagttccataaatttctggaaaacaggagaaatttggcgtcccatgatcaataaactcatgctgagtgggccccattttagaacatgtaaaggagaagaatctgtgttggaactggataataagggttgtagaaatcaagataattgacttatggactgttacaaaatttgaggtaccctaggtttagattggaaaattattttataagaactattaagatatctaacttggattggtatatttctgctggaaagtcaatacccatgctgtattctccttattatgacacgtgtttgtttgtgacccaatttacatctttaaaataatcattataacatgtttaggcacatgtacctgctgaaaatgaaccatatgaaggaggaagaattagcagaggaatggagtgatagccagtactgtcagccttcagtatccatgggggattggttccaggaacctacagataccaaaatccatggatgctcaaatctcttatataaaatattgtagtagttacatttaacctatgcacatcatcctgtatactttaaatcatctctagattactcataaccaatacaatataagtgccatgtaaacacttattatactgtattttgtattttttattgttatatttttattttttttcaaatatgatctctccagtgttggtggaatctgcaaattcagatgccgtgagtacagagagttgattttacttccatgaatcaatagattaatattcatgttcaaaacaagtagtcttatagatttgaagagaatgcaaagcagagctggaaagtgaatgcctctttgttgtgagtcatcattatttgtccaatataggttagtaatttgagtttattttatagtttttctctgctatcctcagacatcagactcttaattcttatctccttttaattattacaggagaaatatttacagctttgctaaagagcttgtgaatcatagtgtttgctgaaagctctaattcaggttgactacagcgttgacattttgcaagttagaaattttctaacttactttaattattataattattattgtatctttcaaaatcaatagatcatgcataacttaaagttacaaaaatattaatgtaaaacaatgtataattaatttatctatgagataatttggtgggactgataagatgtgaaaaaaacggtgtgggacacatttcctcagtgtgtatgatggggtgccaacataaaagacctattattattgaactaagatatagatattaaatatattatttgcaagcactaaaattaccgctagaaggtacaaacacctttgacatcagggctaaaatagctgaagcttacctttgaaaaatcaataaatgcaataaaaagatatttatcattgtgatacttagaagtattcatccaatgtgctaaacatataaaaagtcaaaagtgttcctccgtgtaaggaaaagggtaaagaattaaacattgaaaacaggttttttggcccttgtttaaaatagtttttatattttacttttattatttataaaaatataggaaaaatccagatattaaaaggtacataaaagtctgtccaggtcactgtgtagataaaagaaatgagaaatgtaaagttgatactactgagaatgagatagaaataggagaatttttaaaaacccatacatactgattgtacattttgctgaagtatacgtgatattttgatacatgtatacaatgggtaatgatcaaatcagagtaattgggatattcattaactcaaacatttatctttttattctattaggaatattccaaatctcctctggcaaaaagagtagaaatattaatttttgtttattacatatattttttataccttcaaaaatatttattaaataaaattccaaatatggtattaaattagatttaaacattcaaaatcaccaaaaaaatttacaattgtataactaaaggtacaaattagttctataaatacaaaaagtatggcaaacaattttgtaatatttccaccctgatctagaattccatacctcccacatctctcattatcttttttcttaaggttgttttggtttttcaaacagcccacataactttttcaggattatttttttaattgaataaacatctaaagtgacaggaacttccaaaagtataatgctttatctagaaaggtaatttccatctctttgaaaaatgttcatgtgtttaattatgaaacttgtaaaacattcagaaatatactaaaaataatgcagcatccaatcatgtaacaattatgcggatttcaggaaatgttaatattagattatattttctctttcctattaaggtatatctactatcttgtatttcttgagtacttatccatatataattttaaacttttatacaaatgttttctcatatataacatataatactataatttataaaatctattttgctgtacatatcattttgaaacttactttttttgttgttcatcatggttttcaaacatttacctatttttacttactaagagctagctctctcctcttggttaattctgtgtaacacatcattctatgaatatatcacaagttgtttatcaattattttcccaaaatagctttagattgcttctcgtgttttgctgttttcaagcttacatactactcttactctatgcatctctttgggcctgtagtagaaaatgagaattaaaatattgtaacaaataccaagtttcttttctaagttgctgcaataatttacacttccagcatccacaagactgcacacttccaacatgtatgctacacgaaggtaatatcaaatcagtatgaaatggaattcctttgttgtattttgcatttttctaatttgcagtgatgtacaaatttttatatgttattagcaacttgggttttgtcttaggaatttctagtccaaaatgtacttgttcaactatgttttttttactgagttctttgaatgtatatttataggatacttaatatattgatgacatcaatagctattgaaatgtttatgttgaaaacattgccatttccagtttatcctttaattagttcataacttcattataatattcttttaatatttttatatagcaaggatttttcttatatgatcacactgcattagaaatacatcaatatcctggtattaaaatacatttcatctcaaaatttttgcttttcatatttaagtctttaaactatgtggaattgatgtccagtgtgaattttcactacaattttatcatacatatttggtagctatcctagcattatcctttctacctttgttttcctagctgttgtgtagtgcaaagtgtattatctaaaaattatgcacatgtgtgctcatatgtctaggttttttattctgactgacctttttgtctatcaaaaaaattttcatcaattataattatatgggtgttgtgagattagtgcacagtacctataaacttgtttaacactggagttttttgtgggtatgtgcatgtatgtgtgtgtgtatacatgtgtatgtaatgtttatctatgtgtgtgtatatacatatacatactatatgtgtatatgtatatactatatgtatatatagtctttgtccattttgtgctgctgtaatagaataacctaagactgggttatttataaggaaagaaatttatttggcccactattttggtggctgaaaagtttaagattgggcagcagcatctggtgagggcctcatgctgcctccacacacggagggaacccgaaaggaagtgggtttgtgcaaagaggtcgcatagtaatggaggaagcaagagagagaaaccaagaaagacagacttttgttttttgaacaaccagctctctcaaaagctaatccactcccatgtaagtgagaaatcaatcctcttaaagtgtttctctagtaattctgttatcatgtattatcattttatgatagttttgagattcttaccattagtatttattaataataactgatattttttacattcatgttcaaaatttgtcttgaataccttgtgtcattgtgtgctttgtctacgttttaaaatttaaatattgagttactttatgttgagttacattatgactcaactcagagaactagcatttagtgttgtagatcttttcttgatttttattttattaatttttcattacattctttgttttcatacttttgtatttttgatttggctaaaacattttttcctgctttctgaaatagttacttaacttattgatactaagttgtttaaaacatttgcatttacagaaaaaatacttacttattgctacagatttatcccttaagaatagtatattttttaatttttaaaattttcatggctgtgcatggtgactcacacctataatcttagcactttgggaggctgaggagggcagatccagatcacttgaggtcaggagtttgagaccagcctggccaatatgttgaaaccccgtctctaaaaatacaaaaattcgccaggtttgttggtatgtgctggtaatcccagctactctggaggctgaggcaggagactcacttgaatcctggaggcagagtttgcagtgaattgagactgtgccactgcactccagcctgggcaacagagtgagactctgtctcaaaataaatttaaaaaaaagcttaaacttttaatgattttaattttaaataaaacaatttaaataaaacattaaacttttgaattttagaatttgaaatcataagtttttattgacaacaaagtatgcagataattatacagcttattttgttactttgagccttcttttgagactttgtatgtgagcaaattgaagcagactctgtatgcttatagaaaattgatatacttccattagtgaatgatttgatttatatttataatttgttaatattttacaaattgtctatatccttattgctttgtgctttgatgtggtttggatatgtgtccctaaccaaatctcatgttgaattttaatctctaaagttggaggtgggggcctggtgaaagctgattggatcatggggatggatttccccttttggtgcttttctggagacagatttctcacaagatctggttgtttaaaagtatgtggcacctccaccttctctctctttctcctgcccccaggcatgtgaagtgccagctccccacttcaccctccaccacgattgtaaatattctgagacctccccagaagctgagcagatgccagcatcatgcttcctgtgcattctgtggaatcatgagccaattaaaccctgtttctttataaatggcccagtctaaggtatttctttttagcaatgcaaaattgaactaatagagaaaattggtaccgagcagtggggcattgctataaagatgcgtgaaaatgtggaagtagctttggaactgggtaacaggaggaggttggaacaatgtggagcgctcagaaaaaagacaagaagatgagggaaagtatggaacttcctaaagacttgttaattgctgtgactgaaatgctaatagtgatatggacagtgaaagccaggctgaggaggtctcaggtgaaaatgtgaaacttattgggaactggagtaaaggtcacttttgctatgcattagcaaagaggttggaggcattttacccctgcccttggaatttgtggaagtttgaacttaagagtgatgatttaaggtctctgacagaataaatttctaagcagcaaggagttcaagatgtgtcctggctgcttctaactgactatgttcctatgagtgagcaaagaaatgaattgaaactagtacgtatttttaaaagtgaagcagagcctaaaagtttggaacatttgcaaccgggccatatgttagaaaaggaaactccactttctggggaataattcaaacaggcttcagaaatttgcatagctaaaaagaaggcaagtgctgatagccaagacaacggggaaaaatcctcaaaggcatctcagagacctttgtcgcagatcttcccatcacaggcctagaggactatgaaggaaaaatggtttcctgtgccagagccaggcccagggctctgctgccctgtacagcactaggacacctttccctgcatcctagccactccaactcgaagacaccaactgtctctaaaaggaacccagatacagcttgggctgctgcttcaaaggatgaaagctgtaagccttggtggctttgacataattttaagcctgtgtggtgcatgcagtgcaagagttgaggtttggaaacctcttgctagatttcaaaggatgtatggaaagcctgaatgtccaggcagaagcctgctgcatgggtggagtcctcatggaaaacttttattagggcagcacagagaaggaatgtgaggttgaagcccccccacacacagtatacccattggaacactgcctactggagctgcaagaagagggtcaccattgtcaagaccctctgaataggagatccaccaatagcttgtaccatgtgcctagaaaagccacagacactcaatgctagcccatgagagcaaccatgggacctgaaccctgcaaagccacaggacagagctgtccaaggccttgggaacccaccccttgcaccaatatatcccgcatgtgagacatggagtcaaagaagattatttcggagcttgaagatttaatgactacctgcagtcagtttcacacttgcacaggccctgtagcccctttatttggctgatttctcccttttggaaagagagtatttacctaattcctaaacctgcattgtatcgtgggagtaactaacttttttttttattttacaggctcataggtggaaggaccttgctttgtctcagatgagacttgggactctggacatctgagttaatgctggattaagactttggggaactggtgggaaggcaaggttgtattttgaaatatgagaagggcatgagattcaggagggaccaggggaagaataatatggtttggatttgtgtccccacccaaatctcatgttgaattgtaatctctaatgttggaggtggggcctggtaggagggcactggatcatgggggtgaatttccccctttggtgctattattatgataaagttctaacaagatttggctgtttgaaaaagtgtatggtacctccctggaaccataagccaattaaacttcttttctttataaattacccagtctctggtagttcttcatagcaatgcaagaatggacaaatacatgcttacttagtctatcacttttagtgagaattaggctaacctatctcaccacaatttaggatatatcagtatgcctttaaatagttgtccatttattttctttatatattttggggcaatattgtttaatgaataatgtaccaagagtccaaccctgtccttgcatagttctcattttttctttaattgatgatctactagcagttataatgttttcatttttggtaatgttgggaggaatattgacttaaaaaatacaatctattgtatatctgttataaatgaaaatacagcctatcaatatttctgggatgcagctaaagctgtgcttaaagaaaaatctatagtcctataggtttctgttacacaaaattaaaatctaaaaacagtaacctcagtacctaagaattagaaaaaagaagagtgaattaaatacaaaataagcagaggaagaatagaaaagagtagaaaccaataaaatagagatagggtggacaatttagaaagtcaatgaaattaatctatgcctattttaatacaggaataaaagattaattaactgatcaatacaaaaagagaaactatgaattacagaatcaataataagagagaacccatggttgtatgctaagtgtaatgatgttaaaatgttaataaatactttaaaactttcttgatacttttatgaatgtttaagagctttatacttcatactttaaataattaaaaatatgtataaaatggacaagttactggtacttaaaaatttgaaaatgtctgttggtgggtgtggggctaggggagggagagcattaggagaaatatctaattctgcacatgtaccccagaacttaaagtataatttaaagaaattagaaaatgtataggatcctatatataatatacagattgaataaaaaaatacacattgttttcacaaactactcaaaattcaaatgacttcattggtaaactttactaaatatttaggaaaaataataccaatggcagaaaagatttatctatcagaaaataagagaaggaaatacatcctgatttgttgtttaatgtttttactttgcaatagtttttctcataaaaacttgcaacaatagtacaaagatttttcatgtattcttcatctagctcctccaatgatcatgtcttacaggacaacagtacattgtcaaaaacaaaaaattgacattgacatgtaattaaactcagataaacatggttggatatttggatttcaccaatttttacatgcattcctttttaaaaattattattgttgttgttatcattattattttaaattgagacaaagtcttgttctgttttccaggctgcagtgcagtggtgcaatcatggctcactgcagcctccaactcctgggctcaagtggtcctctacctcagctttctgagtagctgggactacaggtatgcaccaccaaggccagctaatttttttaaaaaatttattttatagagatgtggtctccctatgttgactaggctggttataaactcctgcctcaagcaatcctcccacctctgtctccgaaagtgttaggattacaggcatgagtttccatgcctgactaaaaactatgtttgagtagtattttataaattttttacatgtagaatttcatcagcacattcatgatacaaagttgttccataactacagagaaatttcctcatgttgcaccttaatagtcatatgcttacctcaaacctaacctttgacaactactgaactgttcatgactatcattttgttagagaaaattaataaatagtatcacatataatctagcctttggcaatgggcttttttctcagcataatgtccgtaagctattcgtgttatttacattaatgttggttttaacagtaagttataattcaaaaatttaagacaagcatatctttatccacatatttatctattccttactcttttatcttttctgctatttcagactcattttgttatcattttcttttagtttgtcaaatgttttttgaggcagacaatgctgtcaaagtattgtagttttctcttttttctaagaatgtctttgtttcacctccattactcaagaatacttttactcggtatagaaatatagtttattggtaattttctttcagcacttgaaagcaattgtgctgcttccttctgacatccatatcaaaattcaataccatttgaattgttctcctatagataatgcattgtgtctctccaaatgctttcaccatttttttctgtctttagtttccacagttttgactatgatatccttgggcatagatttatttgtctttacacaaataaaactattgtcagtaaccttcctggatctgtaagcttatgtttttcccaaagtttgagaggtgttcaaccattatttctttaaacagttttccaggccacatttccttcttttcttttgcagtttctgatgttttgttactatctcagatgtcctgttgttctgttcatccttttcttacttttttatttttctctcttgttcatcctgaatgatttctattaatataaattcaaattcactctttttttctcctattaattttatcctgctattgagccacttagtaagatttatattttggttattatatttttcagttctaaaatttgtatgattttgtcttacatcttatatcactttgctgagacattctatttttccatttattcaagaatgttttacaatatttgtccaacaattccaatatttgtgacttcttcacattgatatttgttgattatcttttgtcatttaagctgagatttccacggtgtttgatatggtgagtaattttgacgctatcctagacattttatatattataagaatctatttatatcttctaatttagaaaatagtcattatacttaggatgaatgcatatcctggcctactttttttggtgatggtttaagtaagattttaatttgaacagcctttggaatgatactctgttctgccacaattgtacattaagcacttgacaaactccagctcagtctctatagagcctgctgaggagggagtgggacacagccttgttactaaaggattctgaagggagtgttttacctatagaccctgtttgaaagagttgccttctcattactatagtgtagaatagaacaccgggctttgtgcatagacttggcatcactggttcaccatctcattactgcagtgtgtggggagcagtcaagtttcagcccatagacttgtctgggaagcagcacagcctcatcgttgtagtccatttgttttgctacaaaatacccctggaatgcagagagcagaggattgaagcatagctgagccgcaagccccaaaatcctatggttacttggacttctcttttgaaaccattctgcctttgaaactctggcactctggggctgcaatgggcatagcagcctcaatggtctcagaaatgccgtcagggccattctctcattatcttgatgagtagcatctggcttccttctaataagactagtctccttatgaaatggtcacttggctaagctctgaattttctttcctaaacatgcttttttattctttgtatgactaggctgagaatatttacattatgcttcccttttaattatgagttctatctttatatagtttctctcatctaacattctactattggtcaagtttaatcaatggaagtcactcagcaccatgagcactctgcttagatatttcttttgccagatatcctagttcattaacagcaagttctccctcaaaaaagcattagaacatgaacacaattcgaccaagtttattgacattgaacaaggtttaactttccttcagtttcttataccttgttcctcacttccatctaagacttaatcagaatggcctttagttttcaaatttctaccaacattgtgttcatgatcacttatttcattttattttttgagacagagtcttactctgttgcccaggctggagtgccgtggcgcaatcttggctcactgcaaactccacctcctaggttcacgtcattctcttgcctcagcctcctgagtagctgggactgcaggcgcccaccatcttgcccggctaattttttgtatttttagtagagacggggtttcaccgtgttagccaggatggtctggatctcctgacctcgtgatctgcccgcctcggcctcccaaagtgctgggattacagatgtgagccaccgcggctggccccatgatcacttagatatcactaagactaagccacttttaaaaaattaggacagacatctttattgaaatgtgtctttcggtatatgttagcatactatatatacacatacatatatactctttaacacaactcatgtattgccaccattcatttaaccaataaattaaaactaaaatgatgggagggaagggaaggggaactaatgacaaacttttcatcttatatctggtaagaaattgtgaatttctcagaatttccctggagaaaacctgtgaccagagaatctttgaaataaaatatataaatccctgccccctaccaaaaatatttccaaaagatggagttattacaataagtgtgcttctcagaacaggagcattcattccactccctactcttgcttctgcacctctggcttcaagacagtctgtccctcagtagggcagtgaggtttatatgggcacgtaggctcagtgcaccttgggctctgggggttaaggagcaggctacagtatgggagccgagtgagcaacactcctctgaggttatgtctggtacatcatctgactaagtatgagagttttccaggtccctgtggatgctctcaggctgggccagactgatgtcccagagtctgctggccaggcagtctttctgttcacatctttggtgtctgttgagggatcctcttcaccacctccatcaccactaccttcttctttgtccagtttcttctgagtcttcaccaaaatcactcttagatgttccattcacagcaatacattacaggccaaactcatatcaggtcagcattcacatcaaaatacaccttatttcttgataccagtttctatcttaattgatttgtgctgctctaccaaaatataacagactgggtaagttatcaataatagaaattatttctcccatttctggaaagttcaagatcaataccaggcatctggtgtctgatgagggccttcttgatgcatccttacatgtcagaaggcagaagggctacaagaaggccaaactcttcctcaagcctttttgagaatactaaatctcattcatgaagggagagccttcatgacttaaccttatctcccaaaaggccccagggctcaatattgccaccaggagaattaagttcaatattaacttcagaagggatgacatcattcacaccatagctctcattattgtagggcagagttggaagatagggctatgaccacaggctctgccagagcaggggtatggggtaaaaacaccaaacccagaaacaactttctctgacaggaaaaaaaaaatagcaaagcaatacttactgctacatttttcaagcatgcaaaaataaaacatctagggacaacttacaagtttgcaggaaattatcatttttaagaaaagtttcattttgtcttcttaaaaagagaaaattaaagctcctatgtcaattcaaacaatacaaactaacaggcagaaaaagaacccagatgtgagaaggaatgcaaatcaccacactaagaagctgagaaattactcagcaggatccaaaaataattaggatctgagtgaacatattggtaaaatattaaaagtactttgaaaacttttaagtgacattgagtttagaaggaaatttcttcttggatagtatgatgagacttttttgaaaatagatcaccagtaggggctgacagctgttgcaacatttatttttcttttctttttttaaaaaaattaaacagaggtaaaaagtgaggtttctgtaaagatgcgtcctaataatagaagtatttcattgttttggggtactgtctacactggaattcaaggacagaaaaaccagaaatatatgacacaaacatgcttctttattcaaattctagacttataaaaaccaaataaacaaaaacaaagtaaagcaaaccaacaaacaaacaaaaaaacttcaaagtatgggttcttctgggcagagttcaagaaatttgctgctgcttccaatttaacagaaagctttttttaaaaaaggactcttttacttggtggagcattaaaatgaacaataattcctatctaggtatatgaacaactacaaagatttcagctatactaaaatcttccaattttagtggaagaatgatctttcaattttgttagtggattaaaaatcatagtgatattataacttgaactaatatttttaaaacatgtgttaacatgtatttccttattaatgaagatttaaaactataagttttttttttccaatttttaggagaggcaaaaattcaaaaaaatatccagtaagaaaccagaggaaaaaaatcaactggatagagcagaactatgtgtcctaagctgggggaaataaaaataacgtgaagtattggctggtaaaaatagtctacagatagttattgaagaacctaagaaaacccattattgaccccaacagacaaaagacaatgaaactgcaatggcgttaattggtacttaaaagctttggtgctcttctgaacattgaagttaaaaaatttaaatacactataacccctgcatgcttaactttccttcctcccaattccactctgcttcctccacacttccaaatctccaaattgtgcagtcacctaaaatatttaccaggtcaatttttctttatctcttctcaggatacctttgctgatattgccaggaaagctagatagagtgacctcaacactgcctttctaaataatgttgcttcttttgtcctcctgaagcctctacaaacatgttgccagaggtacttcacgctaagacttcactgctaaggtagggagaatctggtgtcaacttgtctagttaagtgaaaggagaggtggccctaaatttcaaatatatctgtgtgaacactgtttatatttctgtttgtaaaagattgcaatcggagacatagaatgggattcatcttgggtagctggtggatcattccacaaactgtcataaccccaaattcatcgcatatgatatgtcaacattttggcaggtgcttaggcttcttcttgacaaggaaccctttctcatttcccatgcatccatatattcctgtgttctgtaatcagcttgttgacacaagactagtgcttcatttcaaactttcattaccttagctttattgtctttgaagctgcctaatagccatttgtttttaaaacctacgctaactaacacagaataaaaatatctcattcttttaggttactgcacccaaaaactttgattataatttctgggttatgattaatagtcagtataattcaactggatttaataaccagaaatatctaagaagcaaataccttttttttttttttgcttgctgtaaggcctgataagatagcattgcagcacaaatcagtatgaatattctgaagctgtttatatatacaaaacttaatcaactgtttattgtgtgtgagaagtttataacattttgtctgcaagattcttcggggcaggcataatatcaatttttataattgtgaaatgtacaaagcctgccacaaggtagtacaaataaagttttcaaaacctaagttgctaccagtattagttttaataagttcataccaatgaattgacgttcgctttgagctgagttcagataattatcaatgatgagccaaatacagtgcattataggctatggatttattttttcaacataacaagacaattgggggtagaataatggatcccagttagtcatcattggcttcagtgcttgttgacatattaccaatctgattttatctatccatcctcattttgaagcagattctctattattactttatatgatttttctccatgtccaaaattttctaattacctcataaacatatttttacactcatttttttccaggttacaaactgatgcacacattgcatgtggttgctatgtcttttaattttcttctaattaatacgatttcccactttataatcttcatgtcactttttgtgcaagaaacttatcttagattcctaatttggtaatttgggtcattgtggtgccccacatattttcatcctcatgattctgcgaaataacatttggacataaaggctatgttatagtcaggcccaattcattgagaaaaataaatgtgtagaccatcttgtaacctttctgttgtagcatccagtagccatatactgtcttatcatcttgatttcagtgctgctaatatgaaccagtaagtttagatttggtcagcttcatttgctgaaaatttatccattaatatttcacccacaagtttaacaatgactgacaatagttgcctagatatgttatttaattaacatttgcaaagcataactaatgttatcatttttaaaaaatttaatacttagaagtcttcagtaaagaaatttctttcctctatttaattattttgataaggaaggtagaataaattattgtttctttctctgtatgaatagccagaataatttactggactcctaagaatccccgaaagtgacaaattagtttttataagtataattaaaatatcttaggttttttacatgtatatttgatgcctctcaatccattataggcattaatatttgccgttcaaattctgtgaggcagatttttttagatggctcgctctgagattcctacatcctgatatacatgtaccatatgatcgcctccccttgggtgtggctgagacctgtaaacacatggaatagcaaacacaatgtgacaaatggaattttgcagatgtaattaagttccataactagttgactgagttcaatcctaaacaagtttagcaagttagcaaacaatcctagcaactttctgcctaggcatctaggtggtcttcagcatcctttaaaatgcagggtgaaggaagacatgcctatacagcacacctgcagaataagcacattgtggatgctgctaagacttaccacatacacccgctggagtggcagctgaaccactcctgagcctgcttgagccacagctggggtggccaaggcactctgcactggaatatggggagaaaagctccaaggcagccctgggcaacaaaacttgtggagggcatccaaggcctctctctggaaaccagttcacctttctagagctctgggccagtggtgggaggggcaaccccaaaatctctgaaattgcctttggatcctttctgtcatcatcttgatgaatattggggagctcacaaatcctaaaaacactgaaaattttccacctacctagaaacacttgaagaattctcagcataaaaactggcattgatcaccaaataaacaactgtataattatgacaaaatgatgtggataatgatggtggaatattgcatatgatgctctgacaatttacgtaaaatataaccatcaatatataaagaagaatagaggaggactatggaaagtagaataagctgttgattttctgacatagacttagtataaaagatgttttaaatttgatgttaaatgaggaaaagcaggaacaaaagaaactagataattcaatcttactcaaagtaggaaaacaacagactgtgttaaaagcaagaatgatatggatattatattaaggtattaggatatatgcaacaatcaaaacaaatgtagaacatctctaaattccaaacaaaatataaaaaatgaaaatatgaaaatcccaaaaattaaagcaataaaaagagagcacacagtgacaaagagttatataaatgcattaaggaaaacaaaacaaagatcaaacaccttttttgtcctattaatcaagtatgtgagttttttactcatgtacttttaaaaagttcagactggttagccaagtaaattcaaagtctgtgataaagtctggaaaattacagccaggtgtggtggctcacagctacaattctagcattttgggaggctgaggtgggtggatcgcttaagcccaggagttagagaccagcccatgcaacatggtgaaaccccgtctctacaaaaaatacaaaaattagctgagcgtggtggtgcatgccggtggtcccaactactcaggaggctgaggcaggtggatcatggctgcagtgagccatgatggtgtcactgtactccagcctgggcaacagagcaagaccctgtctcaaagaaaataattttcgaaatgttttctagttctgtgaagagtgatggtggtattttgatgggaattgcgttgaatttatggattgcttttggcagtatggtcattttcacaatgttgatccttcccatccatgagcatgggatgtgcttccatttgtttgtgtcatctatgattttcttcatcagtgttttctggttttccttgtagaggactttcacctccttggttaggtatatttataagtattttattttattttattgcagctattgtgaaaggagttgagttcttgatttagttctcaacttgaccactgttggggtataggggagctattgatttgtgtacattgatttgtatcttaaaactttgctgaattctttatcagttacaggagctttttggaggattctttatggttttctgggtatgcagtcatgtcatcagcagacagcgacaatttgacttcctctttaccaatttggatgccttttgtctctttctcttgtctgattgctttggctaggacttctggtaatatgttgaatggaggtggtgaaaatgacatccttgtcttgttctggttctcatgtggaatgctttcaaacttttccccatttagtattatgttggctgtcggttagatggtttttattacattgaggtatgtcccttgtatgcagattttgctgagagttttaatcataaaggatgatggatttatatggaatctacaatgaacttaaacaaattagcaaaaaaatacaaaacaaacaaaacaatcatgtcaaaaagtgggctaaggacatgaatacacaattcttgaaagaagatatacagatgcccaacaaaaatggaacatcactaaggatcaggaaaatgcaaatcaaaaccacaatgcaatgccactttactcctgcaagaatggccataataaaaaaaataaaaaaataataatacatgttggtgtggatgtggtgaaaagggaacactgctgctgggaatgtaaaccagtacaaccactatggaaaactgtgtggagtttccttaaagaactaaaagtagaagtatcatttgatttagcaatcccactgctgggtatctacctggaggaagagaagtcattatatgaaaagatacttgcacacgtatgtttatagcagcacaattcacaattgtaaaaatgtggaaccaacccaaatgcccatcaatccatgagtggataaagaaactgtggtatatatacattatggaatacgactcagccaattagctatcataatataaaaaattgtataagaatattattaaaaagatataaaaacataaacaccactgtaaaaagagtatgtctttttgagatctgtgagttgtatcttacttgcaagcaagcaagtttgtttcatagacatttgcaggagacagagagttgaaggtcagaatgaaaaatctattcattatgtacagcaagcagcagcaagactgtcactgtgttctcatgctggacctcaaaaccacaattttcacaaggtaaaatgatacatacaaacattgttaaagggtcagctgtatatcaaactctgaaccccaaaacagacaatacatcttttaatatgttatattattaaaactgattgcatattaggtgacaaaaaaacagaatgagatcttgtaaaatatataaagagcaattcaaactgttatgtaataaaactaaaaattaaccaaatttgaaaacaaacagcgatttcatttggaaagtaaaacttataaaaagccattaaatagcccttgggccaaaaaaaggcatttcaaaatttgttaatgttatgaaggtaaaagtaaaaatgtcacgttagaaccaattggaatatagctgaaacaattttcagggaaatattaataacctatataatgcttacctaaattcaaattttataatgaaaatgtaattcaacctaatcattaaaaaagagaacaaagtaaatcaaaccaaaagttaattatgttaaaaattaatcaaatatgatggccaaaattaatgaaacagaaaatactaaaatacttaggcatgaagcaaacaaaaaagttgcaaaatctttctcacttgtttttaaatattatttgtttatttagtttgagatgtgttcttgctcggtttcccaggctggtcttgaaatccttggctcaagagattctcagcctctcatgtaacaggaattacagacatgagccacaatgcctgactctaaaattacaaaattttaataaataaatacacaatacactcctaaaaagaataaatgtagaattttaaaaataaaataaaacacatctagagaacattaacaatgtaaagaaaaatcagttctcactcctaataataaataacaccactttttctactgtgtgcacactcttcttactgaaccaacacacacacacttacatatatatatgaaaaggaaatggaaaaacagggtattggaaacaggagtgaaaactttccttgttgtaaagtaccaaagaccttgtctgaatttttttgttctagggctttgtggaatgatgaaattaaggatgttgaactagaatatctgtagaaaaaaatttaagtagcaaagcattaaggcttctctgtggttacttttgacctcatagaatgaaatgtttgagcaaataaatgacttaaagatggaatttataattaaaagggatgcagagtagaaagattggaaaatttgcagtagccccccagtatttagttagaagcataagaagaaatctatttcatggttgtgatggttcctcacacatctgtcaacttgtgcaggttttatatgcacagttcagttcatccactgcagttcatggaaactcattttcacttagtttgcaaaatacgtgtctcttttttttaaatcaaagttgctcttttactgtaaggaaagtcaagaaagttaaaaacaccacagaagcacctctgtctttcacattaatcattactatttaattcactaagcttttgaataattctaaccccaaatttactattattttggctaaacatcccttcttaaagctcagctatttcattggatattatttttatctatctcaaatatatgcatcctgcagaacatttttaattgtctatgcatgcaggttagtgtgtatagttttatgtgtgcatgtatatatttatcaatgtttaatcctttttttaaacactgtcattgagtaggtttcaaagttgattattttcactcaatatattcaaagtattagctccctaacatttagcttaatgaatctgtacttagtctaactagtttttctttctgatttatccatatattctctttaactgtatttcaaactttctcttgtgttttttggcgttttgtagaattactgtaagcatctggggttttttttcttaatcctacttagtttttacttaatttgtatttttaaaccttctagatttcaagatttgttcctttcaataattaaataaaatgcaaaaccatttttcctgatattttctttctctttttttctattatctgcttttaattcattttataattctgttatatttttattgaatgaacattaaacatattttagattatctcactctattataaattttatgggagtttagctcccatttataaatgagaaaatgtgatacttggtgttctgtttctgcattaatgtgcttaagataatggcctccagctgcatcagtgttgtagcaaaggacatgattttgttattttgttatggctgcataatattctgtggtgtatatataccacattctcttcatccagtccattgttgatgcaaactaggctatttctatgtctttgcaattgtggataatgctgcaataaacaaatgaatgcaggtgtcttttttggtagagttatttattttcctctgggtatatacccattgatgggattcctgtcaattggtgcttttattttctactctttcagaaatctccataactgcttttcacaggggctgaactaatttatcacatttccaccaaaagcgtataagcattccctttactctgcagcctcatcaacatctgttattttttgactttttggtaatagccattctgactcatgtgagacgatatctcattttggttctgatttgcatttctctgatgactagcattgtggagcattttttcctgtatttcttgaccacttgtatgtcttcttttaagcagtgtcattcatatcccttgcacatttttaatagggtttttttttcttcttgatttatttaagtttcttatagattctggatattagtccttggtaaagtgcatagtttgcaaatattttcttcaatttcacaaattgtctgttactctattgacagcttattttgctatgcagaggctctttaatcagattcaacttgtcaatttttgttcttattgccattgcttttgaggatttagttataaattatttgtctaggctcatgtccagaatattttctacattttgttttcacattttaatgtttgaagtcttacatttaagtctttaatccatattaatttaagtatatggtgagaggtagctgcatattgttagctagtatgctagcacagttttttaccagacagtacttttccccttccttattttgcttgctttgtaaaagatcagttggttgtaggtgtgtgactttatttctgagttctctattctgtttcattggtctctgtatctatttttgtacagtaccatgctattatgattagtgtagccttatagtatagattgaagtcaagtaatgtgatgactcaggctttgttctttttagttagaattgctttggatattcaggctcattttttgtttgttccatatggattttaaaatagttttgttctaattctgtgaaaaataacattgacaatttgctaggaatagcattgaatctgtagattgctttgggcagtatgaaaaatttaatgacattcattcttccaatccatgaacatggaatgtttttccatttctttgtgtcatttatgatttctttgagcaatgttttatagttctttttgtacagatctttcacctccttgattagatgcatacttaaacattttacatttttgtggctattgtaaatgggactgtgctcttgatttggcacaaagcttgaacaatattggtagagaaaaatactactgttttttgcatgcaaattctgtgtcctgaaagtttactaaagtcatttatcaggtcttggaggcttttggtggtgtctttagggttttctgcataaagaatcatatgattaatgaagagagataatttgacttcctcttttcctatctggattccttttgtttctttctcttgcccagttgctctggtgaggcttccagtactgtgatgaataagagtggtgagagtaaatatccttgtctttttccagttcttaggggaaatgattccagcttttccccattcagtatgatattggctgtgggtttgttacagatggttgttattattttgaagtatgttctttgaggcctaattttttgagggtctttattatgaatggattttgaattttatagaatgtttcttctgtgtgtactgagatgatcatgtggtttttgttttcaatattatttatttggtgaatcacatttatcgacttgtatatgttgaaccaaccttctatcccaggaatgaagcttactttatctagataaattaattatttggattgctggtggattctgtttcctagtattctgttagggatttttgcaactatgtttatgataaatattggcatgtaattttcatattttgttgtgtctttgctagattttggtatcaggatgatactggtttcgtaaaatgagttaaggagaaatccctcctctttggtttttttttttttttttggagtagcttctgtgggtttggtacaaattttttgtacatcgggtagaattcagccatgaatttgtcttttccagaacttttaatggttggtagttttttaaattactgactcaatttcaggacttgctattgattggttcaggttgctttaaactcacaacagtagaaaaagaagaaacaagggcattacatattcaataagaagaatgaactattctaactatatatgcagccaacataggaacacccagattcataaaataattactctaaatctaggaaaagccttagaaagccaaacaataatagtggaggacttcaacaccacatctacagcattagacagatcagcaaggcagaatactaacagagaaattctggacttaaatttgacgctggaacaattagacctaatagacctctatagaatactctacccaacaaccaaagaatgtacatttttgtcatctgcacatggaatatactctatgatcaactacatgcttggccataaagcaagtctcaataaattcaagaaaatataaaccatattattaagcatattctcaaaccacagtgaaatacaaatagaaaccaataccaagaaaaactctcaaaactacacaattatgtagaaactaagtaacttttggttaaacaaagaattaacacagaaataaaaaattctttgaaacaaatgaaaatagagacagaacataccaaaatctctgggatacagctaaagcagtcttaagaggagagtttgtagcactaaatacctacatcaagaagataaaagacctcagactaacaatctaacatcacacctaaaggaactagaaaaacaagatcaaactaatcctaaagctagcagaagaaaagtaatacctgaatcagagcagaactaaatgaaattgtaccctaaacaccatataaagttcaataaaattaaaagtaggttctttgaaaggataaacatggtagatggactgcgagctagattaacatagaaaaaagagatgatccaaataagcacaatcagaaatcacaaaggagacattacaactgaccccacagaaatacaaaagatcctcagagactattatgaatgcctctgtgcacacaaatctgtagaaaatggagaaattcttgaaagcatacaatcacccaagattgagtcagaaagaaaatgcacaaatctcaattgtccagctttactaattttttagactcatatacccaatttcttacacccagatcaaaacatgaaagcttttcagcccccagaatgttaccttgtgttctttctctgtcaatatctgaacaaagaaaaccatttttctgaattctattgttatagattagttttttcaggtcttgacctttatataactagatcaaacaatatgattatcattaattttactaaaaatgtgtcataaatattaattttttatctttttgtctgaattttttttgcttattattatgcctgagataatctattttgttgtatttagcagtgtttcattattttggattgttctttagtatctattgtacaatttaacaaaatttatttaatgtaatgtacatatataaatgtacatatatatgtatcagagtaataaatgcatacacaaacacacacacacatcactcagagcattatgactacaggtcattatgagaactactactaattcaagatcataaattcctcatgagattcttttctgcaaataacatctggtttggaacaacaacaaaattactgtccccttctatgtgaagtttattgttaattataagtttatctctttgggtttcaagctacatatggacataggcaattggagtgcacatcctagtttttcccctttgtctcagaccacttctagctacccacatggaagctaatattcttggtcattcagcagatatattcagaccaaatttcagctttggcactccactatctcacaaggttctgatttttacttaatctatgacttttataatttaattttaaggaaaatcagtgtttaagttgtaaatacaattgtattttatttcagttgggagtgtttacctcggaagtatatctaaaatattgctgatattagaatctttaatgactatttacagaaaactttcaatgtattgagaaataaaaagtaaaggattaaaaattacttttggtagatatagaagggaaataaacatgaaacccaaaatataatttaatattgtcatatttgttatatttgatctatcaatgacttcgcagaagaacacccatacatagtattaagagagaatatatggtgaatggataagattatggctattttatgaaataaaatatttaccaaaacatgttatagtcatatatagtaaaggagagatctcaaaataacactttctttttcttatgttttgtatagaatgtgcttatgtataaaacatgcatatacatttgcatgtactttaagaagtcatgtttttatgcattctttttcatttagttacatgagtggaataaaaaatatttaattatatattattaattatggtaaagattcatttttcttttcatcaaatatgctctaaaactaaatttgtaatggtatcaaaataaaagtagaaaaaagtgtttcttctcccttcttcattgttctttgattttaaatgtttttctttaagattgagtttatatttccctataagcatactgcaacaagagatgaagcagcaatatgatcatactattgatcaaatcttttgatcaaatctattgtgtttctgtttttccttttttgcaaagttcttactctcccatgacttcatgtaaattgatttaagtatattgccatacaagatagttcaaatggagataaatattgcagtgtttctcttgacatacctaatgcctttttttaaggactgcttcaaggtgtacaaataatgctatctatataaatgttaaactatacctaattctacttttaaatatagtgtaatgattttgcaataagatatcaagtagacagttttaaaaatgttaactgcacataatttctaaaataattgtaacacgtagagttaaccatcactgaaataactgttggatctaagcctacttgttttatattagtaccaaacaataaagaaatgccaagattattattggttttaatataaaaatgtgtagcaagtattaatttttcattattttagtggtgctttcttagaaatgcttgctcccattgtatacgaggaccatatcttggtggagcgcagcggcttttgcctgtaatcccaacactttctctgaagatgagagcagaggattgcttgagcccagaagttcaagaccagcctgggcaagagaggaaaacccccatctcaaaaaaaaaaaaaaaaaaaaaaattaaaacattggctggccacaaaggtatgtggctgtagtcccacctactcaggaggctgaggtgggagaatcccttgagctcaggagtttcagaatgcagtacactgtgattacatcactgcacttaaacctggataggagaggaagaccctgtctttctctcaaaaaaattatattttggtataaagacagattattttagatcaaaatctattgaaaaattgattttgcataattttattgtttgctggatgtactgttgttttcccacaaatcattaatgtggaaaaaaataaatatgcattttttttctaactgaacctaatgtatatagtaagcagctctctctccttgtagaagtctgaatgttatttagtacatgtttctcaatctactcaataatttgtattactctcaccctgctctctctggatttgcatttaaaatctagtttatgtgattggttacatggcatcaatgcatgcaattaattttagtcttattcttgatgtggctcaatttatgtttgccattttaatattttttcattatatttaatgtctttttatgcctttgttttcctttactatcttctttttcattaaatattttatatagtaacatttagtatcatttctagaataacatttgagtatcatttacatttttaattttttaattttaaattatcatagaaacataatagttgtatttattcatagggtacatgtgatgttttgatacaagcattcaatgtgtaatgatcaaattagagtaatgaggatttccatcacctcattagacattaaggttgattccataccttggctattgtgtatagtgctacaataaacatgggagtgcagatatctcttcgaggttctgcttttcttcattttggatatacgcagaggagtgaggttgttattgtcagtgtctgtttccctgcattatgcagccactaaggtctctggtcaggttttttaaagattattttcacttttattataaattgccaggtgttgccacttatttagtaaagcttagggttcagccagtgatcagatgttgtgattgaatcctgtgagccaaaaaggcaccaaccctttgccaatacaagtgtattggatgataagttctttcaagacttagacaatttacaagattgtgtcatcattttttccatcttttacatttactagatcttgtgttcagtaaaggatgaactactcactaagtttctttgttatgtatcctgagcttgtgtgaagccttttacatacacacaggtgtccaacaaaggatagaactatatcatggctctcttgtcttcttagttgcctaacatctccctgttaaatttttggcaggtctgctaaacttttgcttttctcaaccagtattgagatcttaacttacctgcaaagttagccttccatgattatttccacgggtatcactagttttgtttacagtatttctgagcatgggatttttccatcctccgccttccacttagactaccctacatgcaaggctgccatccctattttcctgctctacttaaatataaaccatggatcagagagtgggtggacatataagcagcaaaaggtgaaaatacctcagactcccaatggttttacagatgttcaagagataatcataagcaaatgcattttaatgttgggtatgccttaggtctttttcagaaacatcaaatgatagtttttgagaatcttatttagtttaattataattttttggaaaaaagatgcacattgacctcaattttgccatactataattttgttgtatacatttttattatcctgtattttttcctttacattctctagaaatatcaaatgtaccttcatcatcaatagtacctatatttccatcatcttcacagctcttggtgtctaatatatctaatatttattgatgtattctgagagtatagaaaataaattacaatttagctatgcaaattaaccagctatttctggcaaaatattaaaaatagtgtctgaaataaatcatcttaggcaactcatatttgtatctagaaaatttatatctaaataacttcaggaaacaggagacagtttgaaaatgagaagcactgacccaaagcaatacatgttggtcataaaataccagtgagtgattttgttaacaattctagtagcataattttaaaatgtacttgaaagatgataatatacctttgtgccattattcttatacaataaatgatgtaatgaacaacaccaactactatcattgtaagagaaaattcagttaaacaaatgctttccaaaatggctttttgactcaacttaaccgtgataaatttgggttctcttaatgttgtaagagttttgacacaaatcagcatactcaaactgagtaacctgagaatcattaataaaaggggattaagataatagcagagtacagggaaactgcaaggacagtttagtaactcagtagtaggcctaaaggttaagacaggggtaagttacctaaactacataaagatatctgcatggtgaaagccttctgtctggaattctgaattttcatggagagagccaggaacacgaatacagaaaaaaagaagagaacttatataaaaattccaattttctactaaataatggtacatattatgtatatatatattttgagtaaaacatgttaatacatgtaaacatatatcattcagggggaaaagtgaaatgaattttaattaataaattttattttcttgaagcgctttcaggttcacagcaaaattgagtacagagggttcccatatgcaccttgtccccacagatacacaacctacatgactatcaacatgctataccaccatagtaaatttatcacaatcaagaaatcaatgttggcacattatttttacatacagtttatagtttgtattaggagtcactcttagttttgtacattctattcattttgacaaatgtatattaacatgtttccatcattgtttcatcacacagaacagtttctcttccctaaaaatcctgttctctgcctatttatccctccctttaccctaacccatggtagttttttaatgtcttcatagtttcaccttttctcgaatgccttatagttggagtcatatagtatgtagcctttttagattgattccattcacttaattaaatgcattaaaattttctccatgccatttgatattttgacagctcatttcttttggcactgaataatactccattgcctggaggtaccaggatttctttatctattcacctgctgaaggacatcctgattgcttccaagttttggcaattgtgaataaagctgctataaacatttatatgcagattttgtgtagagataagttttcaattcatttttgtaaataccaaggagcatgattggtggatcatatggttagaacacgtttagttttacaagacactttcaaaatgtcttcaaaggtagccgtatcattttgtatacccaccatcaataattgagagttcttgttgcttcacatcccgatcagcaattagtgttttcagtgttttggattttagtcattctaatagatgtgtagtggtatcttgtttgtttgtttttctttaatttgaaattccctaatgccatattatgttaagcatagtttcatatgtttacttgtgatctgtatgtcttgtttggtgaggtgactgttcagagtgtttgctcatttattaattagtctcgtctttttttattgttaagagggtttttcttttgtatattttgaatagcagtcctttaacagatgtgtctttttcaaatatttttttttcccagattgtggcttgtcttactctcttgagaaatgttgtttctaaaatttcaaacatctgcagctctattttctcaaaataataatctattctagttatgaacattatttttcattctattctccaatagccaatgtccaactcattattatttttacctaggactagttctttaaatcaagatctgtagagaaaagtattttgaagtcaaagagagctcctttttttctgtttattatgcttgggttcttaacagaaataaaagaacaatattcaacacaaatgctccctggtgatcttttgaaataattttagaaattcctttaaaataacacgttaaagaaaaaaaatcacattttaatactcactgaagactctaaaattccttttttggcttcaaaattatatgtgtaaatggcaagaatagtttctgaaaatgacaaatggatatgttttaggggtcatatatatatatatatatatacacactatgtttggaggcatgaaaacatttatttgtaagcaaatatatgcaagaataattttgtgacgtttaactaccttcgtgttcaataaaccacagcaattactccatcacaagatttaataattatagtacaagttaaaggttctgtatggttaattaaccactaaatgaataatagcattttttaaaaatttcaaacctttctgaggtaacagaatataaacagtaacccgcaccccccgcaattttcctaaaaatattttgtctgaatttgtacaaataaacataaaatgtaaacctaggtgaagtttttcattgtgagctatctattatatattcttgccattctgcagtcatcatagtgttaaattctaggaaatatgagttgttatttattttctaaaaatgcttatttatgattcttaattacttttgtgttttattatataatagcttcccatggttatgttatctgtacgtagtgaaatgtgatcaaaaaagtttgattacaatacaaatgtaaaatgtgatatagatcttgtttaactgaacattttaatgtgttatttgttatagaaataaaagtcaaagctaatggggatagcattatatagacttagtaggatgagataaaccaaatggactacttaagctgtagcctatatcaatgttgtacattaaatagtatataacttttatgtgactgatatagtttgtatgttcttaccctccaaatgttgaaatgggttcaccaatgttggacgtgggcctagtgggtggtttttgtgtcatgagagcagatccctcatgagtggcttggtcttaccattgtaattggtcccaccattgtaatgagttcccatgagatctggttgttaaaaagtctggagacctccctcttctctctcttgcttcctctcccaccatgtatcatgcctgctccccttcatattgtgtcatgagtaaaagcttcctgaggcctcacctgaagctgaagacatgcttgtgccatggttatacagcctgcagaatcatgagccaaataaacccgtttggctatgaatttcccagcttcatgtattcctttatagcaacacaaaatggactaatacagctactacatgtgatggttgtttatcagtctaaaattcactgacctattgacagcatctgcaaaccttgaggtttttcttctctctccctttcaccattttgtttccaagagacaacattctcttgcttaaccttaatatttacagcccatactcttccctcacactagtctctttactctttatctctgtgaatcctaatagtcaagtgtctcatcagtaattccatatacgatgactccctaattgatctcattttctcttgttgctttataaagcatctgtatgctgatttcattgaaaggtaattctccatgaatattttcacctttagtcatagtctgggctttctgagaaaacagcattgacaaatgtggcttaaagatgattcagtagtaaacatgttatgtgtggtaggtggaataataccaaaaatgtcagtttgctattcttggtaatttgtaaattttttgtattacataacaaaaggaaaattaaaatgagattgacattactaatcagatgatctcaaaatatagagattatcctgtactatttgggtgggctcagtataatcttgagggtctgtaaatgttgaaatggtttgaatttatgtccccacccaaatctcatgttgaattgtaatccccagtgttgaaggaggggcctggtcttaggaaaatggatcttgggggagaatttcccctttgctattctcatgatagtgagtgagttctcacaagatctctttctttaaagtatgtagctacacctcctcccacaaccttcactctcttcctcctacttcagccatgtaggatgtgcctgcttccccttcaccttttaccatgactaaatcttctgaggtctccttagccatgcttcctgtacggtctgtggaattgtcacccaattgaacttctttttctaaatatatacatgaccaagcctcaggtagtcctttatagcaatgcaagaataaactaatatagaaaatttgtactgggaagtgaggcattgctatagcgataccagaaaatgtggtagtagctttggaactaggtaacaagcagtagttggaacagtttggagggctcagaagaagacaggaggatgagcgaaagtctggaacttcctagagacttcttaaattgttgtgaccaaaatgttgatagtgctatggatgatgaattccaagctaacttggtctcagatggagatgaagaacttactgggaattagagtaaagatcacttttgttatatattagcaaagagactggtgacatagtgccctgctctagggatctgtgaacttgagagagatggtttagggtatctggcagaataaatttttaagcagcaaagcattcaaaaagtgtcttggcttcttctaacagcatatgctcatatccatgagcaaagagatgatctgaaactggaacttatatttaataaataagcagagtctaaaagtttggcaaattaacagcatgaccatttgctagaaaataaaaacctatattctggggaggaattcaagcttgcctgagaaatttgcataagtaaagaggagccaaatgttaattaccaagaaaatggggaaaatgcctcaaaggcatttcagagaccttcagggaagcctctactatcacagacctggaggcctaagtgggaagaatcattttgtgggctgggcccagagacacactgccctgtgcaaccttaggaaactgctccttatgtcccaaccactctagctacagccatggataaaagtaccccagataaatgtcaggctgctgctccatttgttgccaaacataaaccttggtagacttttacgtggtgttaagcttgaggatacacagagggcgagagttgaggcttgggagactctgcctagatttcagaggatgtgtgaatatgcctagacgtccaggcagaagtctggtacagagccagagctctcacagaaaacccctgcaagggcagtgcagaaagaaaatgtgggcttggagcccctacacagagtccccactgggacactgtgtggagttgtgaaaagagagccactgtccttcagaccctggaattatagatgcactggcagcttgcactatgtgcttggaaaagctacagacactcaacatcagcccttgaaagccaccatgggatctgagtcccacagagccacaggggtacagctacccaaggctttgggagcccaccccttgcattagtgtggcctggatgtgatgacacatggggtcaaagattattttggagctttaggatttaatgactgccttgctgggggttggactttcgtggggcctgtagcccctttgttttggctgatttctcccttttgaaatgggtgtatttacccaatgcttttacccccattgtatctttgaagtaactaacttgctttttattttagaggctcatgggtggaaggaacttgccttgtcttggatgagactttggactgtgaacttttaaattaatgctgaaatgagttaagatgtgcgggactgttgagaagggatgattacattttgtaacgtgagaaggacatgagatttgggaggggtcagtggtggaatgatatgatttggatttgtgtcacctcccaaattacacattacatcgtaagccccaatgttagagttggggcctggtgggaggcaattggatcatgaaggtggatttcccctttgatgctgttcttgtgatagtaagtaagttatcatgagatcaggttgtttaaaagtgtgtaggacctcctgcccctttctcttcctcccgtaagatgtacctccttccccttcaccttctgccatgattgtaaataagtttcctgaggtctccccagccatgtttcctgtacaacttgcaaaactgtgtcaattaaacttctttttttaaaaaaataaattatccagccttgggtagttatttatagcaatgtgtgaacagactaatataactgtgcaaaagaaagacatagaagtcagtgttaggcaagatggccaaataggaacagctcttgtctgcagttgccagtgagaccaacacaaaaggctggtgatttctgcatttccaactgaggtacccagttcatctcattgggactcgttacgtagcgggtgcagtctacggtgggcaagcagaaacagggtggggctctgcctcacccaaacgtgcaaggagccggggacctccctcccccagccaagggaagctgtgagggaccgtgctatccagcggagatactatatttttcccatggtttttgcaatctgcagaccaggagattcccttgtgttcctacaccaccagggccctggatttcaagcacaaaactgggcagttgtttgggcagacaccaagctagctgcatgaggttttcccttttcatacttcagtggtgcctggaactccagcaagagagaaccatttactcctgtggaaagggggatgaagccagggagccaagtggtctcactcagtgggtcccactcccacagagcccagcaagctaagaaccactggctggacattctcgttgccagcacagccgtctgaagttgacctgggacgatcaagcttggtgggggaaggggtgtctgccattactgaggcttgagtaggcagttttcccataccatttctgcaaaaatttgtgggttaagaagaatgttgggtagaaacagccaaggtcatgtgtgtgacttcaaccttttattttactttacttttctctgtcatggtggttaataggtataaaaatgaatagtattattactcttaagaatgaaatcaaggcaatttgataagaatatggaaatgcatgacattttgtgacagacattttgtctattagcctttattcttttttttagtgagtgtattacattatttgcatatttagtgtaaagataataggttttatctacggtgaaactctttttgataatttatccataattgaattcggctcttagttggtatcttgtgtgtatgtaagtttgtgtagtttagcatccttgtattatattgcatgggttactgcttcaaaaaattatgcgccaaggagataaatgtcaagctcaaaaagttcaaattcttaattaaatcacctgcctttttttctcagacacagtgcatagcaaatggtccaaattttaagcaacactgagttactctcttcaatttgactagctttgttttttagctgcaaaatcttcttagacttaacaatatttaacaaaaatgtattgtgtgatacatttacttttggagtgtgtgatcactgtcagttgtatgatattttgcagtattttcagagaagtgttgtatattaacaatgattgtatccttaagttgaatgattgaataattgtcttttagaagtgatttggaaatagtaaaatgaatgtgagttgacagataccagtgattttaacaagccattcagaaactactccatgtgatttacgtgagctttaacccctcagttttaatgtgagctcaactgaatggccaaatatattgcaatcatttatatattgcaatcccctgggattctagagtttaaaaaatataggattgttctcttagtgctagacggttaaatcctttagagaatgtacaataacttttttaataagagcagtggtgactacatcaaacctactgtggagtaagctgttcctataatcattgagtaaattaaaatttatgaatttatgagttttatctaatacacgaaacagataatgaatacattaagtacatattgtctctatacagttgtcccttgatatccatggaagattgtttccaggattccccatggataccaaaattcacagatgctcaagtcctttatataaaatgatatcatatttgcatataacctatgcagatcctctcatacactttaaataatctctgggccacttataatacttaatgagatataaattcgatgtaaatagttgataaatggtattatttagggattaaggacaagaacaaaatgtctatacatgttcagtacagacgcaaccacctatctcttttttttccctgaacattttctatccctgtgggttttgtggttgaatccatggattcatggaacctatggagggctaactgcattggcttccctgtatcctttgagaaactgcttctcctttgctccatataattagggtgaagccgcaagtcctatgatcctgcctttcatgtcgtaaagatgcatataagacccacgttggcctatctgtgtcaattccatctccttggatacgtgattgtgtggcgatggggattagtaagtgactaagcaaagccagaaagctttcactgattaagaatgctaaagacgttgtctgaatgaagcgacaaatatcagttttaaaatttagaacaaactgcctaacaggttagtatagaacaaatcagaccttatgaagagagaagtgtaagggtatgagaatatgtgtgcagttatgtgcgtgcatgtgcatatagacttgtgtgagtttggctgaagggtaaatatttgatgatactttctttgttcacactgcttgaacgaactaccacaagttggtagcttataaatgacagcaacttatttctcaaagttctgaaatctgggaagttcaaggtcaaggtgctggtgagtattaattcttcaatgaccgagattttgttgtgtttttacataatgaaaagggcacacaagcttgcttgggcctcttttattagatcactgatatcatccataagggattcaccctcatgatataatcaactcccaaagctcccaccttttaatactatcacactgggaattaggtttcaaggtaggaattttggggtgatgcaaacattcagaccatagtaagactatttgattttaattctgttttggattaatccatttcttttattttattgtagattactacaagcttaagatgagcactgtcctcctaattacttacaagtgtacagaataatattgctgagtgtaggtatgatgtttttcagcagatctctagagcttgttcatcttgcttgactaaaacttcacaactgtcgattggtactccccatgttttttcccccagcccctagtaaacaccaatctactctcaatttgattaatttagataacacatataagtgaaatcacaatatatttgtctttttgtagtgaacttatttcacttataggttttcaggttcatccatttgttgtctatgcagaatattttctttctttgactgaataatattcttttgcatacatatgctgcattttctttatctactcatctgtcaatggacatttggggtgtttctatatcttggctatggtgaataatactgcaataaatatagaagtacacatatctctctgagatcttgattttaattcttttagataaatattcagtatatacccaaaggactataaatcatactgctataaagacacatgcacacgtatgtttattgcggcattattcacaatagcaaagacttggaaccaacccaaatgtccaacaatgatagactagattaagaaaatgtggcacatatacaccatggcatactatgcagccataaaaaatgatgagttcatgtcctttgtagggacatggatgaaattggaaatcatcattctcggtaaactatcgcaagaacaaaaaaccaaacaccgcatattctcactcataggtgggaattgaacaatgagatcacatggacacaagaaggggaacatcacactctggtgactgttgtggggtggggggacgggggagggatagcatcgggagatatacctaatgctagatgaggagttagtgggtgcagcgcaccagcatggcacatgtatacatatgtaactaacctgcacaatgtgcacatgtaccctaaaacttaaagtataataataaaaaaaataaaaataaaattcaaaagtgggattgctggattatataatagttctattttacagttatgtggaatatccatattgttttatatagcttctgtaccatgttgccttctcaccaacagtgtgcatgggttctagtttctctatatccttaaaaatatttgctgtgcttttttttttttttttacataatagccttcctgacatgtctaagatgctatgtcattgtgctttttatttgcatttccctgatgaatagtgaggttgaacatttttaaatatacttattggtcatttgtatgtcttctctggagacatgtctgttcaaacttttccgtatttttaaaacagattactgacttatttaccattgcattgtaggagttccttatatactttggaaattaattccttattagaaatatggttggcaaatattttacgctatttcgtaggttgtcttttcactccattgattgcttcctttcctgtgcagtgaataaagccactttgatttaaatttatgagttaagtttttgttttgtgttttacttcatgttttttaaaagttgatttaagtttaatatctattactaggaagctttattaattcgaaattatactcccaactcaataaaatattttaaagattatctgacaattaaaatgctgtaacaatagtattattttttatgaactacaactacaatatgtgaatgccatttttgtttttctcctaaatgtcactgaaaaaaaggagaacatttttgcctcaaaatgtatatttatgtgttccttcccataataaaataacacttcagaatagccaactttaccttaaaggttttgttctaactctgtatgtgtgcagtaaatacattattaagaatttattatatactagatagagaaagaaactgaaagccagacagacagacagaggttacaaccttcctttgtacttgtggagcagtcggggaaatggtacaaagaaagtaagaaggaattcaataaaaagaagtcaatagactaaatttttcgacaggagtgaagacataatttgtgtttaaaggtattccaaaaatactgtgatgaacaaccattgaccactttaagggagaagcattttctaacacagtggtgacagcctctaacagtgcttacataaatagcatatgatagacggtaattaaatgtagaaaagcttacacaaaacccagcttcactcaatgatttactggataaagaaaacgtggcacatatacaccatggaatattatgtagccattaaaaggatgagttcatgtcctttgcagggacgtggatgaagctggaagccatcattctcagcaaactcagcaaacatcattctcagcaaacacaggcacagaaaaccaaaaacttcatgttctcactcataagtgggagttgaacgatgagaacacatggacacagggaggggaacatcacacactggggcctgtccggggggtgggggcaaggagagggagagcattaggacaaatacctaatgcatgtggggcttaaaacctagatgaggggttgatgggtgcagcaaaccaccatggcacatgtatacctatgtaacaaatctgcatgttctgcacatgtatcccagagcttaaagtaaaatttaaaaaaaaaagaaagaaaaatcttctttgtcggggattatcactacatttttcactgatttgagagaaacatgcagctttctgtctttgaatgactacaactgtgggaaatcatatttatttccatcttaaaagtacattcctcgtgaacagagatataccaaagtcctaagaaggcctcagtgactagtaggtgtcatttaagtttgcagtaggtgcacatggaaggcaaatcaatgattttttttttctgtaaggtttaagcagataaagaagaacttttgcaaaatgtcacttgaaactcaaaataaaatagaaacttatagacggttctcaagacagtgagagcaatgaaatagtttctctttaaatctcaaacagtgtttattaactataaaaatagaacagtcaaaagtcagaacattgtaagatcttttcacaaacttgttttttctctctacgtacacaagctttacttgctaagcaggaaactatggaattgtttttccttgtaagtaaaaaagttaaatagttttttacctcagaaataacttgtggccgggcgcggtggctcacgcctgtaatcccagcactttgggaggccgagacgggcggatcacgaggtcaggagatcgagaccatcctggctaacacggtgaaaccccgtctctactaaaaatacaaaaattagccgggcatggtggcgcgtgcctgtagtcccagctacacaggaggctgaggcaggagaatggcgtgaacccgggaggcggagcttgcagtgagtcgagatcaagccactgcactccagcctgggcgacagagcgaaactccgtctcaaaaaaaaaaaaaaaaaaagaaataacttgtattactagtggccttctaccatgtattacatcatacactcatttatttctttatatggaatttaggattttagcatctaatatatacaatgttcttttcaaggcaccacaaggctatagtttttgatacgtttgacaaatcttatgccctcattgaagatatactctagtaataatataataatagatataataagcagtgatatgatatatacataataaaagtaactaagattatattcgtattcatctttattttcattttagtaactactttgtataggttgtataaacatacattatgtattgttatgaatgagtaactttgtagccttggttaatgttgagtgattttaatatggtaagtatgggagtattttgaaaaaaagtagtaattgctagacaaatattttaactgctattatattttaaaaacacagttgcactgaaatatactgtcattattcaatttaattgagtgcattttaggaccaggtgcttgcttaccctcccatttaattgggtacttgttttttccaccttaaagatttttcttcaagtgcgttgccacgtaaccaatgtattttcaacttatagtcagttcttgattacctcctgggattactccattatggattacctgtaacaaactttgcttttcagaacttattgacatcgctatcttctacacttctaattaagtcatttcctgacattcaggctgtttccccaactagtaaagtctgttttaaaagtcaaactagtttctgactgcatttatacattgtaaatttcaggcaaccatcatagttgaataagtttttcaatttaagtattcaaaattttcaaggtattagggaatattttcttctatccaggaaagtaaatccaataaatcaaaatgtttaatggccatattcaaatctaagtcattacaaaccagaaatatgacaattactgagagacataaggtcataaaagatgtatagtttttcctcatattgttatgcttgaagaatgtgagtgggttgcaagggtacagggatccattctttgatccttctctcaaagcatcttttccaccgattagctgatttttaaaattaaattttaaagaaacgtttcctaattatgcatagcattttaatgcaaattactaatatcagaaatgagtatttctgagatcagtaaatatttaggcaaaattctaagcctttgtatgtggcactcttgagagggaagtaagacacacattctctctctctgttttcattaactcatcttcgagggtcaagtcctgtggggacaaatgagtccgtgacatttttcatagtcacttgctcacctgatgctaacctcaccctcttcactgctgaaatgctatttttgtaatcctactcacagctccgtgccttatttcttagcatctctggaattgcctatatttgctcatgtacaaatcctacaacattgtttcacacagaccttacaattgcatattgattatgccttttcatgttgtttctacatgtgctgccttttgttagaggaatctttctcttcctaaagtgttctacacccaatactctcaaagtagtaagacccaaaaactaaacagtgctgtattcctatgagtattcactgaactggggctgcgtggaaatacatccacatataagtcaagtggccctctcctatagattcaattagactcttaaagtccataagaacaacatctatagtttaaatttaggtaagtagatgccctgccaaaaatacttaggtaattatatattatataagtcacataaatgtaacataatataaaatatgtattttattattctatatatgcataactacagagacacaagcattcatacacatacacatgtatacacataaatacatgagtataattacatatacatgtgtatgtaattatgtatgtataatcacatatacatgtgtatgtaattatgtatgtataatcacataaacacaagtatgcatatgtaactatgtatattatatgcataattacatatgcccatgtatgtgtatgcaattatgtatattatgtatgtataattacatatacacatatgtgtaattatacacatatatgtatttatgtgtatacatgtgtatgtgtatgaatgcttgtgtctctatgtagttatgcacatatagcataatgtaataaatacatatttatatatatgcacttccagttctagctgtcttgcttaaaatttcttcctccatttacctctttcctctgtccctttactgtaagtaccaagaaaaaaatgagctgcatcttcaacacttgcttgaaaatttcctccagtaaatatccaaatttattgcttacaaattctgctttctatatatctgtaggttgcacatttgattctatcacaagcaggatatcaagagttataaatagtaggcatttgacttaagagctagaaagaaagctaggaaaagttcaagtttctaagtcatcacttatggataaagtacataaagcaattccattgaaatgaattccctcaacactaaaataaatgttgcaaaaaattatcctcacaaaatatattttttgtaacactctccattcttctaaataattatctaaacttttcttgtctttgcttattattgacattttcaactctttgttagactgtaaatatttaaatatttatttacactttttctaggaatgctgtaaatatgcatcatgtcaatcagtagataaacaaaatagaagaaaagaatgtgatctgtctatatcacttaaatatgagatacttcacatcattatcttaggttttcacatatgtgtaccttttaaggagaattaaataattttggcatgaataaaatatgagtagtgaactgtatacccagtctaaatagttgaaaattcaacacaaactatgttgagtaatattgaaaattgcataaaaatgtctttggtagacttttagtttatctattagtatctatccacgtatcatttatctgcctatctttctatgatgtatctatctatgtatttttgtatccctgtattataagtacatataagcttactaaaaggatctgagcaacacaactggggatatttctagccaaatagaaataaaaaaatcacagaaactggttttgtatttcgtgtttttttgagatggagtttcactctgtcgccccagctggagttcagtggcaggatctcagctcactaccacctccatctcccaggttccagcgattctcctacctcagcctcctcagtagctgggattacaggtgccagctaccacacccagctaaattttttgtgtttttagtagagacagggtttcaccatattggccaggctggtctcgaactcctgacctcaagtgatccacccacctcagcctcccgaagtgctgggattacaggcctgagccaccactggttttgtatatcatcaaaaaaattacatttcgataagttagtcatgtcattcattcaaccttcttttttggggcgggggggcggtgggggatggagtcttactctgtcgcccaggctggagtgcagtggcgctatctcggctcactgcaagctctgcctcccgggttcatgccattctcctgcctcagcctcctgagtagctgggactacaggcgcccgccaccacgcccggctaatttttttttttgtatttttagtagagacggggtttcaccatgttagccaagatggtctcaatctcctgaccttgtgatccgcccgccttggcctcccaaagtgctgggattacaggcatgagccaccgtgtctggcctgtcattcaatcttcttatactacagtttcctcttccaaaagcagggcaaatacctacctaatagaattatttcaaatgtcatgtattaaatacacaatggtgttctttttttttccttgctctctgcatatacctcctgattagttctgtttccctaatccttcaaacttaccatcaaagcataaaaaaaattgtagcaaggtatttttaactataaaacaaaaggttcattgccctttgtgttcgattaatttatttattcatcgaagacatactttagtaaacatatgtatatgccaccgttataggtactagaaaaaaatagttttaaacaagaaagacaagctatttttttctaacagagtttactgactagaggagaatatggataataaatagactatgaaatgaatttaattacagcggtaagtactctaaataaatcaaagcatggtaatgagatagagaatcattgaagtctatttatatggtacttaggaggggtattttcaattaattcctattaagacagagacctgaataagtggagagacaattatgtgaatatttggggaataattacctaggaagaaaaaaagttgagaaagccaaaatagcattgatatagttgtattacatcagatcggtatgattatagaaataaaagtttaataacagaggaacttgatagaaaacgaagctgaggaaacacatacagatggaatcccggaaggcctcatgtgaattatggtaagaattttaaattgtatttaatatttaaggtgctagagtattgagaccaaatgacaaaaaaaaaatgaattgtgtttttaaaagaattttcactgctatgtggagaatgtagagaaagaagagtagaatcatgaagaccactttgaatcttttgccatggaatgcattacatttgtttacgggtggatgagaaaatagacacattttcccccaaaataagtcacttcactatcatcaagctgataagaacattttcattaaaaatagaaagaaaaatatggtctctctccacacttaatgacttccctttatttgaaaaaatacagcataaaagtctttgggcatagtgctataaaatgaataattatggataaaagattcaagaattatggacatatttctatcccaaaagataaaggttttgctaagttgatggcactaccggctattaccctttgctctttccttatctatacactttcaagtgtacccttacagtgcggtctataacgggcaaggctttctgcactgccccttgattctgagctcagtcacttgattaacttttttttcttataaatgtaagggtataagtgcagttcaattacatggatatattgcatagtggtgaagtctgggcttttagtgtaaccatcacccaaataatgtgcatagtacccattaagtaattttttctccctcacacccctccaacgctgtcaacattctgaatctccggtgtctattattccacatgctatgaccatgcgtacatattacttaactcccgcttataaatgagaacatacagtatttggctttgtgtttctgagttgtttctctaagacagtggtcatcaattccatccacgttactacaaaagacataattttataatttttatgggtaaatcgtactccatctatgttgctgcaaaagacattattttatgggtaaagagtatttcattgttatatcacattcaccttgaaatgttagcaagcatgacaaagagacaaagaagaatactttagtatttcaggtactgcacttttcctctgctatcaacatgaggaggacatgcctaggctagtccagggtaaaagtattagaaatatatgggccagagtaatgaggcattagatttcttcaccaaaactatcatagatcaacacaaatctaaccaacacccaacaagcagatactcatagccaacctagcttatatcaggtaaagcactcaaattcctgagctaatactaatgtcaatcaggttgtgcgattgtaatgcaacataatggtcacaatatgtaactgatacaatagcgcagagaagtgaataaaataactatataagaaacttttctgaaaggacattaatccattttgaggcttgagtctcagcatttggaagtcttcggtattaaaaatatcttaatcatcataggcttatggattaaaatagcaaagaggattactttcctatttcccatttggaaccctagagaaagtttcacaaaatgtgagaggtctaagtgatgcaaaggggttggaaattgcaggacagaaaatcctccaagtttgttaacatttctcattctatacacaccctactcttccccctccatgactgtcactacccttctgttttgtttttacaggacctgggatggaattctgaaattattgtgagccccacttcaaatccacaccccctccaaaacaatacatgagagataccttgtagtattgatacagtgagttacctgaaggtctgtagaagtttgcgtggggctgagaacagaatgtaatcttaaaaggagattctttgggaggccgaggcgggcggatcacgaggtcaggagattgagaccatcctggctaacacggtgaaaccccgtctctactaaaaatacaaaaaaattagccgggcgtggtggcgggcgcctgtggtctcagctactccggaggctgaggcaggaaaatggcgtgaacccgggaggcggagcttgcagtgagcggaaattgcgccactgcactccagcctgggagacagagcgagactccatctcaaaaaaaaaaaaaaaaacaaaggagattctgtgcccgcaggggaagatactttgggtactccagcagtagatgcagtaaggatagagacaaagcacagagaaaaatgttaatgaactagagtgtacctttggataaagggagcattcaaaaattctggaagactaagtatttaccacttaatagacaaaatctagttcttgtttattcgacatgtatttactgatcagctggtatgtgccaaatattggtctagactctggggatgcagcaaataattttaaaaagagacaaaaggtgagactgagtaaatctgagttactgaaataaatcagaagtgattgttaatttacatgaatttcattaggtatgatgcttgttttctggatactgagtgtgaatggtaaattatgagaaagttaaacagttatggagaaaaatagttaatttctacatatttgagttaacgctccagaactgaaaccaatgtcaagaataaatggtatatttgatctctgatgaatatttttatattagcatgtttatgaagatatttggattggaaagtaactcaagaaaaacagcatgaattttcagaataagtgaacattgcctaataacagaacatatcatttgatataactatccttatttatttatgtatttattttctttgctgtaatggaaaaacaaaaattagcaacttaattcaggaaagtactgagtatttgtttctttcttattatctgtgaatgatagtctgaaatgtcaaaagtggtaattatatgcaaaataatatgacataactttataaacatttaaaatgcattaaagtccattaaaattatgctttggtttctgaaagtacaaaatgtctttcctagaaatacttgtatgttggacctggcagaactacaattctttcacattttaaataacaacaatgtaaaacgaggctgcagctgtctcagaggaaccctcaatcaattgtttttctgcttttccagactctcatttatgtaactgaaacagatattgccaacagagcaactccaagaaaacattacaaaccattaaacaataagggtttctgacctgttattttcttccactaaggggaatataaggattgagaataaactgaagaagtcaaatagccagattcattcaaaacagagcatgaaaaaaaaaatcagagcaaattggaacgtaaagctgtatctctagcagcttcagatcaacaaatacataaacttttcatacagtaacctaaatagtggattgactaaggcataaatagataatctaggacttgtttattcaatgtgtatttactgatcacttgtatgtgcaaagtattgatctagattctggggatgcagcaaataattttttaaaagagacaaaattttactcttttggatgtgacaagatagtattttctttcttcattttttccttttattcatttattcaacaaatatgtaatgaagaccaatgatgaggtgatagtatgacggttcctaaatccactttgatgaatagacaggttgattttctgccctcataacgctggaagcatagtgcatttgcatgcctctagagttgtaaaaaataagtgacttgactttcctttctaaaaatatttatctaaactttgaattcggaatggtaaaatatgggaagtaaatttaattaatggatctaaagtctttaattgtgttaagtaccatgggtgttgcgaagttgaaattctattagtctccactctttagcaaccctttgatatatccaacattttaacatctgttttaaactaatgatctctattgaactgttactgactcttggtgcaaaaatgattgcgggttttgccattacttttaatggcaaagccaataaaacaatattgtttgtatttaaataataaattacgatttttgtttttaaagttataaaaggcatattcatagtcaacatagtacaaattcctgctttgtggacagtgaaggtatttcattatgatgcaatatgattttgtatttaaagttttaaggggcacattcatagttaacatagtttaaatccctgctttgtggacagtgaaggtatttctgttgatgagatctctctggctcaactatccacttaattatatccagctgggcagactcaactgccaaggcacaaagaaactcatttggtaagtgaaccctggccgagatagaaaaaagaacttcttggttctcattttccccaccctatgcatgaatagttgaccaacgtctatatagagtcttcaaaattattgcagctatcatttcacaaattgctcttttcctgacagcaaagactcactcagttttctgaaattttgaagagactctttatgggaatacaaatggtggttgtcagagaaaaaaaaaagcgtgctttttcatcaatctgactcaatagaaaatgaagtctaccgtaaagttgtgcttctgtcattcaaggtcaagaaacagttaagtaacatcactcaaaggattctgaagctagtcgtccctattcttgttccagaatctatgagattgcttcttcctttttatgccctttaccaagggggagtaaaggaattttataagagggagattttattgcataatagaagaaaatatatttttatgccagagtgtttctatccctaatgtggtccccaggtttcatttaccttcgactccacttgattttactctgtactttcttacactatgctctgtgctctggaaccctggatttcatattctatatgggttattgtatcctctggcttctggttagatacagctgtgggagtgaaaattagggcattagcagaagaagccatggagggtgggtattcggtgctggctacatttaagacaggcaagaggtagagtgtctggatttctccatggaagccacagtgcctttggggaagttatcttttactatcattttctcttctcaagttcaggctgagaaggactttccctatatgagactgcagcgctatctgaactgttagtatttctaggctggaaagagccaaggaagcaaaaaaatgcagaaaggtatattagtctgttctcacactgctataaagaactacctaagactgggtcatttataaagaaaagaagtttaattgattcatagttccacaggctgtacaggaggcatggctggagaggcctcaggaaacttacaatcatggcagaagggtaaaggagaaacaagcatgtcttcacatggtggcaggagagagagtgaagggcggaagtgacatacactttttatgatcagaattataattcaacataagatttgggtggggacaaagagccaaacaatatcaaagggagatgattatctctcgccagtctctctcagctccagcaaagaagcactttgactcctcagttagagggtgctttggaaaaattattgaatctcttgcactgtgggatgccctaaaactctggttccagcaccaacgacacacgcaacagaaagagaaagaccagaatttcaattgccttgtagagcaaggtacaatttttgaaaaataaaatagaaaaaagtctgaaaacattagttaaattattttcacttaacattttcacaatatttatgtttctagaagataagcctaatgaaaactttattttgttttcattgtatttattagttatattttattgtggtaaggccacacatgatatctatcttcttaacaaattttgaattgtacagtacagtatggtttactgtaagcactatgctgtagagaagatctccagaattttttcatcttccttaactgaaactttataccatttgaagagcaactagtcatttctttctcctcccatacagtgtaaattgccattctattttctgcttctatgaatttgactatttacatcatctcgtaaaaggtatcatgcataaaatacatatcttcataaaaggtatcatgcagttgccgagaccagctcggttggggagaccctaacccagtggtgccagaggaattaaagacacacacacagaaatatagaggtgtgaagtgggaaatctggggtctcacagccttcagagctgatagcccctaacagagatttacccacatatttattaacagcaaaccagtcattagcattgtttctatagatattaaattaactaaaagtatcccttatgggaaacgaagggatgggccaaattaaaggaataggttgagctagttaactgcagcaggagcatgtccttaaggcacagattgctcaacctattgtttgtggcttaagaatgcctgtaagtggttttccaccctgggcggtgcaggtgttctttgcccacattgcggtaaacccacaaccttccagcgtgggcgttagggccattatgaacatgctacagtgctgccgagattttgttcatggccagttttggggccagtttatggccagattttgggtggcttgctcccaacatacatatctgcataaaagatatcatgcagtatttgtccttctgttgctggcttatttctcttaccataatgtccctgatgtacattcatgttgtcacagatcacagaatttctttcttttaaggctgaatagtattctatttgatgtatacaccataatttctttatgcaattatcagtccataggcattttaatcttttccacagcttgactattgtaattaatgctgaaatgaatatggaaatgaaaatatatcttcaagatcctggtatcaatctctttgaatgtatacccagatgtaggattgctgggttataaggttattctattattaatgttttaagagaatttcatactactttttgtagtatccataccgttttacatttcaacgacaaaaaaaaaacatttaattgctccacaaacccaccaatatttatttatttagataattattttaacaatatgagatgacgtctcattgtgaattggatttttatttccctagttatcagtgatgttgatcaatattcatataactggtggccatatgtctgtcttatttggagaaatggtgatttaagtctttggcccattatttaattgggttacttaagtggatttggtggttattctttgcttttattatgttttgctgttgaattataggggtcccttatatattttggataataacctcttatcagataaatgttaagcaattagtttttctcattttattgattgttttctttgccatgcagaagatttttagtttggtgttataccaccagtctacttttacttttcttgcttatgtttttactctcatagccagtaagtccttgctaagaccaatgcctggaagctttttcctatgtattcttctaggaattttgcagttcagatcttaagttgacatctttaatccactttgacttgatttttaggtaatatgtaagataaatgtccactttcatttttttccatgttgatatctgctttttcatatgttatatattgaaaatactattattttcctattgtgcatttatggcatcattttcaaaagtcagttgactgtacatgtatggattaatttctagcctcttcactctgtcccattggtcaatatgtttgtctgcatgctagtatcatactgttttagttcctgcaactttgaagaatgctttgaaataaaaaaaagtgtttgctttagttttgttctttatcaagattgttttctccactcagcatttttgttgttccatactaatttaaagtctctttattctattttttaagtagagattttgaaagaaactgcattaaatctgtaggtcactttgggtagtatgaacatttttaaaaatataatacttccaatctatgaatatgggatactttttcaattatttgtgtatcctacaatttctttcagcagtacattatagttttccaattacacattttttattccttggttaaatgtatttctaagtattttaatttttgatgctatggtaaatgggattatcttttaaaatttctttaaaaacagtttgttgttagtgtgtagaaacaaaattgatttttgtatattgatttctaccctgtaaatttactgaacacatttattaaactggcaagttttgttggtggaatcttcagaattttctacatacaagattatgtcatctgtgagcagagttaatttcacttatttcttctcaaattgggatgtgctttgtttctttttcttgtctaatagcactagcttggactttttgtactatatttaatagaagtacaagagtagacattcttgtttctgattttagaggaaaagctttcagggttttcatctttgaatataatattatccagaagcttttgaaggtggcctttattattttgaggcaatttctttttatacaacatttgttagaaattttttttaatcataaaagggcattaaattttgtcatttttttctttctgcatctttaaaatgaccatgtgatttttagcattcattctgttaatgtaatgtatcaaattaactaatgtttatatgttaacacatatttgcatcttggggataaattctacttggtcatgctttatgattctttaagtgttctctctctggaattctgttggctagtattttgacgaattttacatctatactgataaggttaagggaggagaccacccctcatattgtcttatgctcaatttctgcctccaaagaaaaaagaagtgaaaactaaaaggcagaaatcaaatccacaggctgtcagctcagtgccacaccctgggcctggcagttaaagatcgacccctgacataatcggttatgttatctatagattacagacgttgtatggaaaatcactgtgaaaatccctgtcctgttctgttccgttctaattaccagtgcaggtgcatgcagcccccagtcatgtaccccctgcttgcccaatcgatcacgaccctctcacactgacccccttagagttgtaagcgcttaaaagggacaggaattgctaatttggggagctcggtttttgaagatgtgagtctgccgatgctcccagctgagtaaagccctttccttctacaattcggtgggttcttgtctgcagctcatcctgctacgaggtgttttgacctacgttttctgatagtgtctttttctggctttgatatcagagtaatattggcctcatagaatgagtttggagaagttctttcctctttaatactttggaagagtttgagaatgattgtcattaatacttctctaaatattttatagaattcaccattgaagtaatctagtcctgaagtaatttaccttttttgttgggaggtttttgattagtaattcggtattcttaatagttagtattatcttcaaattttctatttcttcatgattcattgttggtaggttacatctttcatggaatttatctatttcttctaggttatgccattgttgacatataattgttcttagtagtttcttataatcagttttacatctgtggcactggttgcaatgtctctttcatttacatttccatttactcaaatcttctctttttttcttagtatagctaaagatttggcaactttgcttgtctttaaaaagacaactcaatttgttacctctttttattgtttttccgtcctttttttatatttctgctctaatctttgcattttttttcttctactaatttgagcttagttttctcttccttttttagtctcttgggatgtaaagttagatagttcatttgaaaacttgtttttttaaatgtaggtacttaccgctgtaaacttttctcttagtgctgctttgatgcatgttataaatattggtatgttgtgttttcattattgtttctgcaagatattatattagattgtgttagatttttctaatgttgataagatattttctaatttttaaaaacttcgtgtttgaactattggttacaagtgtgttgtatagttttcacagatttgtgaattgttcagttttcttctgctcttgatttctaattttattccactgtggtcataaagacacttggcatgatttcagtcttctcaaatttgttaaggcttgttttgagacctaacgtgatcaatactggagaatattctgtgtgtgcttgaaaataatgttcattctgctgctgttttgtaaaatgtcttcatgtttctataagttcaattttctatttagtattgttcaaatacttggttttctcattaactttctatccagatattttatccattttgaaaacgaagtaatgaaatcttttacttttattgttttgctgtctacttctcacttcagttctgtcaatgtttgtaacacatatttaggtgttctgatattgggtaaatattatttaagaattttttatttttatggtgaattcactctttaatcattacataatatttttctttatttcttatgatattggttgacttaaagtctgttttgtctaatataaatatggctgcctctgttctctttagattaccatttgcatggactagtttttccattccttcacttttagcctatgactgtccttaaatctaaactgagctccttgtacacagcatatatttggttcttgttttttgcttgtttgtgtgtttttaaaatgcatttaactattctatgcctttgagttgaggagtttaaaacatttacatgtgaagtaaacattgatagaaaagtacttaatgttgctattaaattgttaatttttttctgtttgccttgtacttctgtcccctttccctctcttgctatctttctttgtttttagttaattttctgcaataatataatttgattcctttctcgttttcttttgtgtttcttaagttttttaaatgattatcataggtttacacaaaatgttgtatagttataacagtatatttaagcagataataacaactttaatggcatacaaaacctttatacttttacacttcctgctcttcattttattgcatttatgtcacatgttacatattcttatatgttttatcccttagcattttttatttttatttttatacattaatcatttaatttgtatactaggattaaaagtaattcacgtactacctttacagtataacattttgtactgtctatatattttcctttatcagcttgtttatgctttcatgtgcttttatgttgatgcttagcatccttttgtttcaccttgagtaactcatttgttcctttgtgtggattatgtttccttattactttatttttatttactacttgttttggtatcgacagatgataagaacaacggcttcctctccaagtcctcccagtgtggcctcatatgggagaaggcattcatcattagcctagccagagattcatggggtctttaagacctctctgtgtatgcatcctctctggacttgtgcatgtacatttcgaacgtgattttctgctttctttttttagaaatgtataatttcttgcttcctctgtcatctatcggctgtaccatgtgccttctggagtagcagcatgcacaaactcattttcctgttatcagtaccccccaggcatctacagtgtgtcagaatccacctatgctctgagacaggtgagactgagttcattccctcaggcaaccacctaaaaagttttaaatttgacaaatgtgttagtcatatctttctcttcccagagataagccagtcactgggagtcttcttgactgtgttatgctgagctgggagtaggcctctgatggatgagtttgtactagcctaaacttttgccctgttcttagcgttcaggcatctagagtatgctagttcctaccagtgttcccagggagttgagacagaagccagtccttggtgcggcccgctgaaaaattggaatgttgcatgccaggtccaatgcttttcctcccctaggataagctgtgaaaagaggtttcttcccaatcatgtggcactgtactgagggacaggctgtgagaggtaagtgcacacttcaagctattgctgtcttcagtgttccccagtcatgcagagtgtacctgatctcatcagcactctgagactggaaaaacagaagccaattcctgggtcaaccccacaaaatttggaatgttggctacatcatccaaactctttccctctccagggagaaactggaatatggaggtttctgcaagctcgatctgtgcagagcgagagaaaggggctatgataaatgaatatatgctattaaaaatcaccatctttgttctcggcagcccccaacctgagatcatcttctgtcagtatcacttggtcagcctccagaaagtgagaacgttggacatatgctccactcttttccttttctttttttttttctccagggagaaactttgatctagggtttatcttcacatggtgaggttgtgcaatggagaaacataacagtgtgacggtgcttcaaattttcctaccagcttctatgcagctggttttgtgtgctaaagtgcaggagcctctcaactggttcttggatttctcataaggaatagtttttccttatgttgtgaaattgatgtgccgtctgggaaagcatggctttgtattttaccttcttgctgacagccttctgcaaacttatttttaattcctgtttgctcttcacaaaaatttgctaatttttaacatattttaattgactaaattttaatttaaaaatttgctaatttttaacatatttaatttactaaaatttatgtgactcttttatgacttaatttatctttttaataaaaaggacaaaagtaagtaaataaataatgatgataaaataattactctgtgattattatagtaatgtgttaccttactgagatttatcttcaaatattagctgaagggacaaagaagtggatgattagtccagatgtagtataaagctgcaggttaaaaagaaagtgaaaatggtaggaagaggtagcagtgagggtagaactgagatgaagtatcctgagtgcagtgctttcggtaacacatattttctttgtttatttgttattattcccatacagtccaactagttcagttgtatttttttttaaagatagatagctgtgcttcagtatctggaccagatagaatctttaagtttcaaattattttaatggtgatttatgcatgaaaagactaaatgttctatactccatatatgataaaatatatacttaatataaatacatttcataaaaatatgtaactgaatatccatgtgacaaaatttacaaaagaaaaaactgtattcatattttaacatgtattgaagtgattataatttacttaggggtttgcggattaacaaaggagtacacaagtaaactttctttacattactatattttagtgtaggtacaaataagcacagtttatttttattttttagaaaatgcttattcttttagaaatgctcattatttatctgagaatttttaaaaaatgctctggaaggcgcataggtttcagaaagcactggcttctcatgctttagttatccaagtttctaaggggaagtaatttttctgttgttaagtctttatacttattcattttagttcaccttttggttaaaatctcttggattaaacaaaacagaaagaaatgtcttatctaatgcctttctctgagttacattgcaataatatgcacacaataaagtagtttacttaccaagacatgaaaactgcttttcagctagaaatacaaatgttctccttgattgagttttaatgaagacagatatatacatctgcaaatgtatatagagaaagagagaacgcagagtgctagtacatgcatttatgagccagcaagatgtgcaggctttctttgtctgatattattgtaacccatgagtttggatgtaagtgaagcattagtcttacagagcagcttttcctaccactctatttctcttcttttcagcctagtgtcaagctttcaaaccaagccctctttttcagattatctgagctatctatatcagccttttctcagcaatgaatataaatgttacattattttctgaagtgtaatatttaccacccatattcactttctctttttttttagccaaatatagctgtcttttggtctttatagacctatacatccatccccctgaccatgaatgaataggcttggattcaatttcttcaacctagcaactttgcctgctcttctgtaaatttaaatttgactcctggctttgagattattgcacaagcctgacaatcaaataaaacatagtccttcttctataaagtgctattttcttacacatgtccaaacacaaacacccacaaacccttaaacatgcatgtattccaccaaattatatcatattagagttatctttctttagcaaaaagtctcttccaaaatatgactaccaaaattattaagtcttttataagatgaataaaatcagacagtttaatatttagagctgatgcctttaatctttagcattttgtattttttttcccttgacaatctaatttcttccccacagttcgccaaggctgtaaactataagtgaagtagaaaggtatgacaatcatattacaaaatattgaaaaggttaaagtagtaaagcacctttcccaggatatatgagacattaagattttggtattttatattagtgaagagattacattgaaaaaggtaaatggcacaacaaaaagtcattatttttaaacagaaagttcatgaggattctatatgataatctttcttttggtcttgaatcttaaataatatttttatagtaattttaacttaatttaatttaagcacagctagaatttatgtatgcatacatgtttataagttaaatatatatgtatttatctcacactttaatgtactgtctagactcactgtaatattgtcaattgtcaatacaatattctttatattaaaataagatttttgatatatttgggggttacattctgtatgatagaaccctaactggttttattgttaagagttcaaagggctttttagctgtgacagtccttcctggatatttgtgttgaagtttgatctcacttacatttcgccttagccatgttctcttgccctaagatccagattattacagcagaggttagtcaatgctctcaagacttccaaccctgaggacttaatgaacgtggcaatctaaacacaggaacttgtctaattgattatttcccaggatgacagtgaatgcaatttaagaacaaacttttatggcaagttgtaactgagatttacattcattcactcaaaagcattactttaacatctactgtctgctggggcattgttccagacaagcaattctcaaagtgtgaaccatgttacaatacaagggtcttagagattaaaaaaaatcataataatattatgatatctgcttttttcactttccatatctcaagagaataaagtcttccagtgaagtcttccaggagctaaaagatatatcacaaaagattgtatataaaaacagttatgagaatctagctgccttctagtaagtcagacattaaagagatgcacaaaaatataatataaagccactatttctcaataaacatttttgtttgggaaagtgtaatctttaatcttttaagtgtgatcttttaagtaagttaataagtgtataatttaatttaagtaagttaataatcttttaaataagtaagtgtaatcttttaagtaagttatttttgctatcatgtgtaattatagttaataactggaatagaataagtttaaatattgctaagtttgaattcctaataccataaattttgacagctatacacaaaaatgacatgtggattcattaataatatttaagggtataaaggggtcctgacaccaaaagatttgtgagctgctgttctaggttctagaatcttaatcagttttcttctcctgttctcatgaatccattatggaagtagtatagactattttagaatgatccttagctatattactgttatttcctattttaagctttgagaaaaacttgttttcaactctcaagcagttcatgccagttcctggaataaaaagaacatctgggaaaaatcccaattagtgttgttttgtcctagttctcttatttccagtttttccttagagatacaaacgaaagacccctaattatagattttaaagttttccttatcctcttccatttggctactaggtgattctactgtgtaaaaacttagctccacctttgcacagtggaagtatgctagctgatgaggtttatctgaggtgcaagtattgctaattcaaaacttttcccaatacccggccatgatgacttgaaatatggtcgacattggcaattttcgacagtctctgcagagaatgaaccatctttgtttaaaaaaacgaaaacaaacaaaaaaacaaaaaaaaacttagctccatgtaaaggactttacatctaactttgtgttgaatgtacggtcacataattttacaaacctcttccgtttaacttgcccagctgtgtaattaacgatggtacaatatgcagttctaagacccttgcaagccaaattacaagtcttcagacccttacaagtctaagacccttacacttctaagacccttacaagtctaattattttgcgttttttgtttcatatttactgccccacaagacaatatatatccacattgtaatatacaaattatataaattccaggccgcccacggttttttttttttttttcttttgccattgtgttttctggctctaccactgatttgtacacatgcctttctcctcacaaatattttctcattcgggcatcaagagaaaccattttccacaggctttggagagagaccttggttggaagcccagctccgccatgaactacttatttgatctctggcatgttatcagcatttctagatcactagtttttcatcaatggaatgaaaataattacagtacctgtcttataaatttgttattagaacaatatggattaaagcatgaaactattttgtaaacattctagcacaatgaaaattttcaagaaatgcttgttgttatgatttttttgtttattgttaagccaccaaacctgatgactttcatttctgcccatgaatgtctctgtattctgaaatctttcagtctaaaatatgcattaatattttctttgcaaacttgtatgcaagttacttatgaaacagagcaggctaaggccgattggtgttggaattttttaaatgaatactatcatttgttatatggatttttaaatttcagatattagttgtgctctttaagctgataggaaaataatattttggtatttttttaagatgaaagctgaaatttggaatcaggatgtttttaagtaaagataaaaaggacatgcagccaatcaaatcaaatcaaacttgagattataattatgaaataatttcatgtgaaaatcctaattccaattttgtcatggacgaaggtatctattgctaacatgaaatttgattaaaatgtaaattattgtttgagctaactaatccaaacctagaaaaagtacaaaagcatcaaaatgaaaacaggtttgaatgtttgctttattgataattatcccattaatcactaccaaacttcaatattttaaaaataaaaatcagcctcatgtatttagttttttgtttgcttgtttgtttaaaagtaagctcagctggacaagaaagtaattttagcaagaagaacctttggctaagacctagtctacctgtccttgaactttagacatcatatgttccaaagttatttcaatcaattttaaaatctatgcaacaggaaagtaacagtatgttctattgtatgggttaagtctcacaaataatgcacttgcatgtatatgagttctttcacttattcagttcttttcttaaaatatgatctcctcagagaagacttaatgaccacctgtcattaatagctgctttcactctcttcatcttactctgatttattttttccacaacaattttaactcctgaaaaattgtatttcttaatttgtttattgtttattatatatctccactagattgtaagccagtgaaagcaagggtttgtttctgtactctgctatacatatttccagcttctaaaagtagtcctggtatataataggttcctaataaatatttgtccaatgaatagatcaatgagtgtatttagaagtagaatttcattaaacatttttagaagcatttaacatgttttacatatcttaagatataattttattattatattaattcaactttgcaagagtgcacaaataaatgaccgtaatgaatacatgtacatgtttttaaaaactgggtagtctgatttaatggatgtgagcataaacttatttcagagtttattcatatttaagtgtcttccttataaaatacaatgaagttgtgaaaagtacaggtctatcattttaaaatatttaagaaaaatttaaaaagttgtctaattcatccatttttttgaaatatatgttttaaaatctcaaaataagcacccatttaactaagtaaatatgagtgctagtcattactggtcagttacattttttccaccttgaaaattgtacttgaagtttgaaaatagactaaataactgcaaaactttaagtaaaatatatgcatatttgctacaagtctaccaagtgaaattaacaaatacaactgcttttaaataatcatctaccatttataatgtcatattttcatttatttaaattctaggatttatttttcttgagttataacaacacccccatttattatttcacagtttctatcgatcagaagacaggcagagtgtagctgcttctctgttcagggtattacaaggctaaaaccaaggattaagccagattgcattctcatctggagtataggagccatttttaaagttgaaaatgtattgatacctaaataatctttctgtactacttgttatttgatgcttttttagtaccaaatatttgatacaccttacacctttaaggcgtaaggtgatattttagtgacttatctaaccctcctgaaatttattcaacttttttctctattctgtgtcctataactttccatcacttgatttttcatcctattgccaaatactacactcaacttaaaaagtcttgactgcaaatgtttctgtgtttttaatttctagaattataataggtatcttatttctcacaatatatttaatatttgaaaaaatgatttttgagttataaagtacttttaaaactttgaagtatttgacattttaaaatagaaagatgtttatgatgagaatcattaactttgggttttaataatcctctaagcactatttacacaaaaaattcttttttaaaaaaattcaacaggatttttgggaagaggtggtgtatggttacataaataagttatctagtggtgatttctgagattttggtgcacccatcacccgagaaatgcacactgtctccaattagtagtcttttatccctcacctccctcccaccctttcccccgaatccacaaagtccaatgtatcattcttatgcttttgcatcctcatagctcagctcccacttatgaatgagaatatacaatctttggttttccattcctgaattacttcacttagaataatggtctccaattccagccagattgctgtgaatgccattattttattcctttttatagctgagtagtattccgttatatataaatataattatatataaatataatataaatatatattataatatgtaaaatatatatttacattatatatataattatatataatataaaaataaattatatacatttatatataaatatatacttatatatacttatatgttatatataattatatatgttatatataagtgtatatagtatatacacatatatatttttatatatgtataagtatatatatacttacactatatatacttatactatatataagtatatacttatatatatacgtatatatacataagtatatatgtatatatataagcttatatataattatatatacttatatatatttatattatatataaatttttatagctgagtagtatttatatatatagatatttatatttttatagcttagtagtattccattatatatattatatattatatatatcattatatataatatatatgaaatatatattccattatatataatatataatatatattccatcatatataatatatataatatatattccatcatatattatatataatatattccattgtgtattatatataatagatataccattatataatatataatatattttccattatctattatatataatatatattccattatatatattatatatataatggaatactactcagtataaaaattttatttatatatataaaattccattttatataacacttgttgattgatgggcatttggcttacttccatacttttgcaattatgaattgtgctgctataaatgtgtgtgcaagtatcttttttgtataatgacttcttttcctgtgggtaggtacccaggaggaggattgctgaatcaaatggtagttctacttttagttctttaagaaatctacacagtttttcatagcgtttgtactactttacattcccaccagcagtgtaaaactgctcccttttcgccacatccccaccaacatctattatttttaattttttttaattatggccattctttcaggcataaggtgatattgcactggttgggtttttttcctttttctttttctttctttttttttttttaagacggagtatcgctctgttgcccgggctggtgtgcagtggcgcgatctcggctcactgcaagctccgcctcctgggttcccgccattcttccgcctcagccttccaagtagctgggactaccggcgcccgccatcgcgcccagctcatttttttgtatttttagtagagagggggtttcaccgttttagccaggatggtctcgatatcctgaccttgtgatccgcccgcctcggcctctcaaagtgctgggattacaggcgtgagccaccgcgcccgacctattggtttctttttttgacacggagtctcactctgccacccagggtggagtgcagtgatgcaacgtctccctcttgggttcaagcaattctcctgcctcaggctcccaagtagctgggattacaggtatgggccgccacacccagacaatttttgtattttattagagaagaggtttaccatgtttgccagtctggtctcgaactcctgacctcaaaaaatctacccgtcttgggcttccagagtgctggggttacaagtgtgagccactgcacccggcttgcattgtggttttgatttgcatttccttgatcattaatgatgttgagcagtttttcatatgtttgtttgccatttgtgtatcttcttttgagaattgtctattcgtgtcctttgcccactttatgatgagattgtttttatcttgctgattcgtttgagtgacttgtacattctggatattagttctttatcagatgtatagattgccaagattttctcccaatatgtggattgtctgtttactctgctgattgtttcttttgctgtgcagaagctttttattttaatgaagcctcatctatttatttttagttttgttgcatttgcttttgggttcttggtcatgaggtctttgactaagccaacgtctagaaggatttttccaatgttatcttctagaatttttatgttttcagatcttagatttaagtccttgatccatcttgagtagatttttgcataaggtgagaaatgaggatccagttttgtccttctacatgcggctttccaattatcccagcaccatttgttgaatagggtgttgtttctccactttatgtctttgccttgtcgaagatcagttagctataagtatttgggtttatttctgggttctctattctgttccgttgatctatgtctatgtgcctatttttataccagtaccatgctgttttggtgactatggcctccctggtgtgaaacccacttgataatggtggattatcttttcgatatgctgttggattcagttagctagtattttcttaaagatttttccatctgtattcatcaaggatattggtattctttttttttgttttgtcttttcctggttttggtattagggtaataccaacttcatagaatgatagcagaaagatttcgtctttctctgtcttgtagaatagtgtcaacaagattagtaccaattatttttcaaatgtctaatagaattcagctgtgaattcatcttgtctgtactttttgttggcaattttactgttttatatacttaagcagataggccccattacgtacattttctcaagataagcagtaactagttctcaagtaagaggacttaatggcatcttttattacacatcctaaatttatatggaaattggggtaaccatctatgttagcacaattgagcaaccagttaacaataatttattgtatatttcataatatctaagagaggatttgagatgtttccccccaaaaagataaatatttaaagtgacagatatcccaattaccctgatttgatcattacactttttatacttccaccaaaatatcatatgtattttataaatatatacaactattatgtatccataaattaaaaaacaaacttcttaatctcaaatagagtaaaatgataaactaaggaacagaggcaaaaatagtatatgtgtcttcgggcaaaatattagttttgaaaataaacaaataaaaacacaaatatagcagacattggattagacctctaaaggaggcaggatgtttgaattgaagaattactccctttacttttacttgtttctttctctgcccttcttattgtgatctcagttgccacaattatatctgcaacccagaactctgtgaaggcatattggtgaaggctcaaagtcattaaattttgaacagatgtttatcatttgacgcagcaccaatgttgacaacactagtcactgtcacaatgacactggcttgtcgaagggcactggtggaaatggagaaaaattaatgacataacatttgcagagaacttactatacttactgtgtatctgtcactgtgttcaatactttgccagaatctcctaacaacagctctgagatacaggttctatcaataatttatcatcactgtatagttaaaaaaatttgggcttattcaagatcatactgataataagtggtagatccaggatgtgggtccaattgatatgtggccagagcctgtgtactgtgcaaatttctaaggtgttatacttgtctagtctccccatcactgtatgtatgtatgtcttgaaaattgatgaagccaccattgccactgctgacacttcacgttagctgtgcattcctcttaggaacagctcacctcaatcatgcaaatttcaatagattaaaaccttaacaacctcctaatctaataacctttgttatatgtcattaataaaacatctcctttggtttgacttttatttgcagtgtttgtccttaaaacttaggcataatgaaagaatccaaactggcaagaggcagccattatggtctcttcaaaatttcttcactctattttcctttgtcctagaaaactcttgagttctccctgaaaggagactaaagaacaatcctctgcagatgtgtctgaatcctaaaatgaacttaaggtatgtctaagaaggttccacaagaattcctagacttctaagatatttttgtattccaatatttaatgtagtatttatattagattgtgtataagttgctacttgttgggaaattttgacttattgccttattctcttcatttttagatttttagttcatagaaaaataaattgtttaattctcaatgccaaatatttgatgagaatccaaagaggaattaaaactatatttgttactgtcattctaaaacttagctacatgctttagcttttcagatacaattgtgacagatatagtacacattgctcttttgaaaagtttgagtaaaataaaataatgaaaatgcaaatatttaaacttataagctgatttttctgtttggtgaacttgtagcagaactctgcttctgcacataatattcttttagaaaccatgtattatttctcaatgttgatttatattatcatattcttataaactgtactatgtttctgttgtatgaatgcatttgtacaactctgtgcatatgccaagcttgaataggaagtattgaaaatagagcaaagaggatttttatttaatctgaaggaaagattatataaaatatatatttacttttgataagtaagattatatgttaaatctcacctgaggtattttaaatagcccagagtttgagaaatgccttactgatgattgtcctttttggggtcatcagaattgactacatttctttgggtaaatgtgggttgtttccctgaaggtatggattccccagcagatagtcttttgtggaatatgaaaatttattacctaaaatcctgctgtgggaaggagaccataggctggagagaggaaaaaaaaaaaaaagaccttcttccttctgctggtgtgcagttagtttggcccacattctaagggatggacagaaagacctgagactcttagtgatggtggcatgaggggtaggtgagttctcctttgccaagtggagaaatgctaaaagcctgccaagaggtggcctgcaaagggacttgtgacgtgtttcagactgtgcagtacttgaatattatttttcacggtaagttctttcatctaagggaaagttttgaataccggcttattaaatgaagtaattttagtatttgtgaaagcaattagggattttttttgtctattgttggggtgaagtataaatgtatataaaagtgcatattcactacagcactctttgggcattgcaacctatcagtctcacaagggccagagacaggaagcagggagaagaagaagaagggctctgaattaaaggatgcctaagacttgttttcagtatgcataaactggaatattggtaccttccagaagtagttggcaggtaaaactaagggaaactaatttccttaggtaaaaatagggtgggtgcagtaggaccatgaatacagaatttgtagcatatacatctaaatttcaatttagcaaagaatcccaagaagaaaattacatgcaatcactttctacagtaattttcctctaagttccctgtccttaaaagaagctaatatgatgaagtggctgaatagacctagtaggaagagatgctaaagaatgggattatagtaatttattattcaatcatctataagatagttttacctatatgtaacataaattaggtagcaaaattacctggggaaaaataacatcagtctagtggccgagaatgaagaaatatctacagggaaaactcatctctggcaagcagaaaagatgagatttcataaaatgaggtttaaggggaatagttcactttcattggttttttccatgtagcagctcaagatattagaaagcaaaaaaacaagattaccaaaggataaagaatgggaaattaaataaaagaacactatcaagtttgaattaaattcaacacctatttaggtgagttaccagagagctcagttttaagaatcaagcaaatcttgaatgtatacctagtagatacatcatgatgcgttttttcttttagaactattcttttatgtttttttctttccatttccacgtgatttgtttgagacagtcagtgaggacaccacacccttcacccaaccccaatacacacatagtaacagaagaggcgtatttgccagttttccataatgtccatgatgggccaatgggaattttttacttgagaatgagaatttttagaaaagatacatggaattttagatggctatttttaagtgacctgatcagtgaatgtgtttcaaaaaaagctttgataagcccttatgctttatgttattagttgtatatttgcaatatatatacagtcatctgccacataacatttcagtcagcagtggaccttgtatacaataacggttttataagattataatactctatttttactgtgcattctctatgtttatatatgtttagatacacaaatacttatcattgtgttacaactgcctatagtatttagtagaatcacatgccatacaaatttgtaacctaggagaaaaagagtataacacatagcttggattgttgtagaccctaccatctaagtttgtgtaaggatactctgtgatattagcgcaatgataaaagtcacctaatgacgcacttctcagagtctattctgtttttaagtgacacatcactgtacatatattctttttaatgattattaatttctcaatttggacccatgaaaaactattatattcttttaataactgctcactctttcactagagcttcctgaaagctggttccattttccaaagtcagataacattatctaatagaggatatgatataaatgttgccagaaatttgtccagaaggacaaatttaagaatgttaaatatttcatgcagttcttgtgagtaagttactatggacaatatactaccatatagatactcacaaaaattataggttaagatcaaacatgagatgacagtcaattgcattcaaatgattacacacacacacagacacacacacacacacacacatatatatataatactgattcatgaaaataaatatctcactttattgtaagaatgagaatatagccatgtggcaaaataggaattgaaaaggaatttgtcagtggagacctttgctgtaatatgaacatttagataaattggcaaagatttacaaaatcttctactactgtcaacttgctcatgctagatgactctttcctaggtagcatatctcatctaaacaaattcaaacatttgtagttgagttaaacaaaatatatttgagcacattttctgttgaaatgttaattcatagagtaaaacattaatttacaatttggaagaattgcaagtagaaaatcatgttataaatgtattgaatcattatgttctccaatgcctagtccatatgtattatttttccaaatttaaagaggtcagatttttaaaaaatacaatgttttttgaatcttcccatgtttagctcccctctaattattttaagagctaatgtcattattaaagaagacattttgaagatcctcttccaagactcttccaggcatttactaattttgtgacatatttttgttagaaagcatctggaaattggatctcagtgacttaccaaaagaaattaaatatatacatacatatatgtgtgtatatatgtatgcatatatgtatatatacgtatatgtgtatatatatggttttacatttaagtacaaggaataacatttaaatacctttgcactgtcttctttaatataacattgtatttcaaaaaagaaataaaatattagatccaatttttattatgctacataagaaaacatggaaaattaaataatggcatctatattgttttcctgttactgctgttaataaatgattacaaacttaatggcttaaaacaacaaaaaattattatcttatggttctagaagacagaaatctgaaatgtatcttatgggttcaaatcagggtgtcctcagaactgcattttctctggagactctagagaagattccattttcttacatttttcagcttctaaaagctacctgcattctttgttctgtgactccttgttttatcttcaaagcacatcactcataactccactctttatctttatatcacctctcctctttgacactctgatagttttgtctacttttgtcaagaacacttgtgcctgtattgggcccattgggataatccagggtaaactccccattcaaggtccttaatataatgacaggcacagagttccttttgctaagtaagataatgcagtctcacgctgtatggtttaagaccaacctgggggaggcattttttagcctactatactgtttctagccttagaaaaaggcacaattttttaatggccaagaagtaaaacagaattaaaaccataatctcagtgttaggatgctgtctctcaattccatttaaatattcttgttcttaaagctatgtaacagatcaaattatttagaaaatagtgctattaagtgcaaagtgagttgttggagaggtcaacaacatgacggttgtaggtaccttaataagaaacaaacaagacagaaaaatagtttgaactaataatcgaactaattgcggaaatttgaagagggacttaaaaataataaattaagcaagtttaccaatactgctaaaagaatgagctaaaaatacacaaatgattggattgataactggtagaatagggaaaaataaatttaaaatgtaagaaatattttaaaatattgactcaaaatatccttgaaggatctcaggatggaatatagacaattatataaaaatttaaaatattaaaaagtattactagtagtgcagggaaagaggacatgggaagatgttggtcaaagggtacaaaattacagttacacaagatgaatttcaagaaatgtacttacatacgccacccttaaatatgtggaccataattttctaccccataattgtgtcccagtctctttcaaggagtactgtagaaaagtggagcttcaagaaaataactacacagtgaagaagcctgacaaacaccatttcagccagttgaccaaggttaacatcatcagtgatgtcatcctgatagcatgcaccttattatggtgtaatcagaatggcattttacctgtgtggtcttccacccaagaactcctaatcccaatctaatattgagaaaaatatcagaggaaccttaattgatgaacagtctacaaaatatctaaccagtgttcgtcaaaactctcaagtcacataaaacaaggaaaatatgagaaattgccacggtctagaaatgtctaaggaaacatgatgacttaaatgtaatttgatatccttgaaagaatactgggcagagaattaccattaggtaaaactgaggaaatttaagaaaagcatgtactttggttcatcacaatgtatcaacagcatagtgaatgtatcgtgctaatataaaacgttaataagaggggaaaccggaatggggtatatgagacctcattgaactagctttgcaagaatttctacaaatgtgaaactgttctagaatacaaattaattaaggtaaatcaattaccctggaaaactcggtagtcttctccatcatcactttttcattgagaaatatcttgtccaggatatcagttatttaataataaataattattttactgtgataaaatgtatgaaacttaaaatttgccgttttaatcatgtttaagagtacagttttgtagcattacatacacttacattgttgtgcaactattatcattatccatctccagaacatttttatctttccaattgaaactctattctcattaaacaaaaatgtcccatatccccatctctgcaagttctttctctacgaatttgactactctaggttgcttatataaatggaatcataataatatttgtcattttgtgtctgacttattttactaaacacaatttcttcaagattcattcatgttgtgacatagcagaattttctttgttttaaaggcagaataatatttcattttatgtgtgtaccaggttttgtttccatttatctttcaactaacattatggttgtttctaccttttggctagtgtgaataatgctgctatgaatatttctgtacaaatatctctttgattttctgctttcaatccttttgagtatatacccagaagaggaattgatggattatacataattctgtgtttacattcttgaggaatcatcataaaataataacttattattaacaagaattagaccacctgagaaacatacactataatattaaaagaggttaaaagaaagataacattttaaaaaactcttcacttaatgttcttttggcaaaagagaattgtaactaaatattatagaagaaatttaaaaggaagaataaagcactttaataaaggaagattataaagtagacatgcaagaacacagagtagataaggcacaagaaagatgaaaataaaatatgagtttataaattgaaagatagcatcttatatcaaaaataattgatccataattgtaaaaacagaaacaaatcttattactttttatggaactttgaaaataatgaaaaaatatttgcacctcttcttaggtaaaacaaatctaagtaatttataagtagcatgataacaatatatcaaaatttcatggaaaagttttagtacataaatgtctaaaattaatataaattatgttttttaaattccgtatgtcctcatcttgataacaaacccattgttcatccaagcaattgaaaaaaaaatcagattggccttggatttctctagagtcatttgcagtaccagtagactgtaaagatcttagatagtttcacgcgaacttctgcaaaatataaaataaaaaaaaaatttgcacctctgctactctgatgaatacacagccaaaatatagcctagggcacgtgcattgacctaattccctcctgaataaatatacagccaaaagtccctcaaacaaaaaatgaatgctaaataatcctacttgtatctctgtatactctttaaatggaaatttaatggagacaaaacatccccatacaaattgaaaattgagaatacgtgtttaatttttttcctgtatgtaatgtatataatatgttgctaagaaacagggaaatgatttcatttctcttactacctatccgtatttggtataatttataagtagttaaaaatagttaatgtgaattaacagtggaaatattatgtcttgccaaaataagatgagagaaaatacaaggtaccacctctatccacccattacacttaatatttgacagtaagtttgtttgcaagaagatagcaagtctactaaatcctgaaatgtcttgtgtagcatgaaaaatgccattcacttttctaatattttgtctcaaatttgaaacagcaaatatgataaacattttaatcagaggtgagaaataaacattttaatcagcggtaagaaatttaatagactttgagcccagccctataaataataactgtgaggtcactattagtactgacatcacagggttttgactcatatggtataagcctatatataatattattaaattatacatggaaaataataaacaccatattaatattagctgttattattatatgagccatattcaatgaatgtttgtcagagttcttcagtggcaggcaaaattctgagtactatataccagtgaccaaagcaaagagtcttcccgttgtgaaatttttctcctagggatatgttggggaaagagaatacaggcaatacaattttttataatcatactatcgtatttattatgtgataagtgctaagaaaaataaattaaaattgaacaagatatacctagagctcaataaaatacttttaatttcttctgatacaataattattaaaatatagaaaaagttataataacatagtacaataaaatgtagagcaagttataaggggttcacaggacatagttgagaatggttccacttttaattaatcagagtaaacctcactgagtaaataaatacacaagctgtgcacaaatagagcaatagaaagttggtgggttaatgaacaagaaagaccatctttattttggaatattcaattttgtagcggtatgcaaaccaaacaaaacaactgcaggctgtgttctgtttatctgctactgtgtttgacctctactttaaaacagaaaataactcagagcgactgcattctaaatttagtctactagctttcaaaacatttgttttgtcagtgctacacacaagatttttcaagttaatataaatgtggttgaaatgtatactagctcatccttgagctattgcatagcctcttaactagttgcctctcgttgtcttgtttctctttccatctttcttacccagataaacttttttagatgaaataaatgaatgctttactcacttgatcacaagtagtcaactctgcagtctactaagtcaaatctaaacaggttaatctctaccatcctgtgtctttttccccaactacactttcaaatggcatatcatttcttgcacatcacttatactgttgcattattcagcctttcctcacttttgttactgtgccaggacattaatcaactgcatacatttccactgaaataatatcccatctttcagtcttatacagccaattcttctgatttttaccaacagaaataaactcttctgaagtcctacgtttctttgttggtactctttttataatatacttcggttgtaatataattcctcatattggtttacattccttgtgagtttgaacatttttttgcaaatgaaacctacatagttttgttttctactcagaaccaatctcaaatagatgatactaaagaaaaaaaatatgagagtatgagagttgccattcttgtatccatcaccttgtgctccgaattaaacagataaattaaatagatgaaattactttttatggagatactttatttttacatggacaaatatgcatgagaaaactagctatgctttatgctgttaataaaggaaagggtgaaaatagagtagatattactacataagtaactactgccttttatagctgaaaaaattcatgtagcctattagagagaaaaaaaagagagagaaaagaacaagacagagagagagaacaagcaaaagggcaagcacaagaacaagagcatatccaatatcaaattcaacataaataaaactgatagactcaataccaatataagaataatttacatactatacattatatcaaaatatcagttatttaatagaaattaactcgattgttcaagtttgaattaccatttttacattttaattttaataaagtccagtttatcaagttttttttcatgtattccatctttagtattgtttctacaaagtcatcattatacccaagatcatttaggttttttcctgggttatcttctagaagttttgtagttttgcattttcgttaggtctgtaatccagttttatgtaacttttctgaggggtgtaagatctatctacgtttatatttttgtatgtagatgtccagttgttccagcaccactcgttgaaaaaattattgttgcttctttctattgcctttgctcttttttcaaagacaagtggactatatttatgtggacctatttctgagctctctattctgatctattgatctgttttttttaattctttgccaatggcacactatattactgtagctttatagcaagacttgagattgagcagtgtcagtcctctgactttgttattctccttcaacattttgctgttttggatcttttgcctctccgtataaactttagaatctttagaaactttaatgatatccataaaataacttgctagaattttaaatgggatttcattgagtccatagatcaattgcaaagaactgatatgttgacaatattatctttctatccataaacatggataatttagttatttgatttttttaatctgaatcttgtggtttttcttcatatagagtctgtaaaaattttgttagatttatatctaatatttcatttttggggtgccaattttaaatattatgtttttatcttctacatgtttgttactggtaattattatattttaaagttatattgaggagataattgatattaaacctttataaattagacatactctcaatttcatataaattttcatgctttacatgttgttcagagtatttagcacaaataatctactaaaaatagaaacagtagcagtaatattaacaattaaagtgaataaagttaaagtagaataaggagaaataaaaaacttgacctataaccaataacaaggttatagaattagttctcaaaattcttcccagaaggaaaagcctagttccagatggcttcatcaagaaaggaaaatgttaagaactgaaatgtaatctctaattctccctcagtgtggaatacataagattgtactagatatagactaatgttcttgatgagattgtttagtgaatgctgttcaaaggatgtatctgtcaaacatcttgtctgtgctgttgaaatgtttttttacttatctatacttgttaaaatgcagcaaaggaatgaaactagtctgacacttcaaagagtgttacatgcttatcgaagagtgaaagtggaaagaatgcagaaatgaaagtttctttctgagttgaggtggttcccagtcagcactgattactgtaaaaaagcacattcctgtgaagtgtgattaaagatatcactatttatgcttgggagtcgcaaaagcctcactatattctttcttaaaactaatgtaccgtgcttctcagcatgatttatagtttctcatggcttaggctatcaagcagagctaactaattaatttgttgatgacacatatgccaaagatttatattaaaccgaaaaaattgtttgaactaaatttttatgggtaacttaaataaagaagaaataccctacaaattaaaatgaagccagtataactgttataataaaacctaacagaggcacagtagtaattgaaaacttaaaaacaatttccctgaagaccataaataaaaatattttatataaaacgttagcaaatcaagtagatataagtatgtgtgtgtgtgtgaaaatacaaacaaaaaagttagatttattacaggaatgtgaggttgatttaatattagaaatatcgattaatttaccacattatttctgcaaagagaaacatttgatcgtctcaattgaaatggaaataataataatatatgaaacttttaagctacgttaatagtagtttaattcatttggattgattgttctgctgaaggaaaaacagaaagatcaaaacaatattttaaaaaatcaaagtgaggaataatctagaaaaactgaggaaacaacagaaggcaggtgactctgaattgtttccaccgtgatgtatttggtgatctggtgtaggtatctgagagactgaactaagctgtaatggactaatttggagatggtaaaacaggaactgaaattcggtgtcagccatacttggaaaccctggctaatcatctctcttctgggctagacccacatgagctaaatctctttaaataattttattcttataaacgtaaataaagagctccacatgcagcgaacttgaagagcttaatgaattaaggttgaattccagtgattgccagccattcagtccctgatgaaacccacccagctccagatgcagaacacaacagcactagacataatagtgttgactttttctcagcacgtcctctagagcacctagaaacaatggcccttgattctggactgctaacatccacagtgtctagtaggagaaaaggaaaatctgtggagtaagaaaatgacatcttaggtatcaaattacttacataagtaattattttaatacaacatggtgagcataatctaagacaaacagcaaataagaagataaaactatgtaagtcataatgagcagaacaagttaaagacagaaatataccctcaaaattttagttaaaaaattatcaggtgctgtctgtatgatacattattatagtttatcagctattgcttggaaaacctaaacttttctcttttttatcggtacatttgttttggagagaattttattttctcctaccaagtcttgggataatcaaccaatttaagaagagctcaaattttatgaataaaagtaaatgatacccaaatcatttataataacactgcagaaaatcaaagacagatacatcgttttaaaagtctgggttagggtaggaggaaagctagatcagctccaatgaggtaatattctgataactgagttttcagtagaagcagaaaaaaaaagctctatgtcagttagttccatgtatggaaagacaagacagtaacttgtattccaagacaagtttagcccaaagctgcctctttacatatttaagttcagcctgaaggtttttctgtacattgtgaaatataacaagtggaagtgtaaactgaccctagcctgcacctgtgccaatcactgagttttggccagtgaaatgtagccaactgtttgaactgtgttcaaataaggcacacactgagctgtaaccaatccagttgtttctatatctcacttctgatttctgtactcgcttctctctctctcttttttttctttgtctagaagtcttccaccacatggctttgctggagtctctctgaatctgctgtgattctgggggctgcacaattcgtaaatcgttcattgcttaattaaactttaaatttaattaggctgaagtttttctttaaacatctccatctagtaataaaaaatttctttcaagaattagaacttataaagattttttagatgaaccaccaaattataatcactaccaaaagataaataatgcaagaaatgtcaagcctgttacactaataaaagtaaagtaattctagataggaccttgaattgcaacaagttatgaagattgaataaatacatgagcaggtttgaaaatcaagtaaatatgtaggttaatataaatgaatattcatggtgtcaaacagaaacgttttaggggatttaaaatacaaatatattgaattaaaacatctgacatgactataaattggaagggtagaaatggagttaaagtcttttaaattacttgctcttttgaaaaggaaggtcaagataagacaaaaaaactttattaagtcagaggttcatgttttaatttcttgagtgaagaaggttcaaaaaaaatgtaaacatcttagttgatggaacaaggaaagcttcacttgagattttttaaaaagaaaatggtgtcttccctccttacttctattcaacctgacaccagatgacctaatcagatcaggacagtgagaatatgaaatacactacaataatgaactgggaaaacaaaaaagaaatacactgctactagtgctgataccaagtttgctgcttaaattttccaatcttagtaatcagactgtgttcaatagtgtacatgttcttagcagtttttttttaaatatctggatgttgcaggctagtagttatggggatagctagggtgagggctgatgtctgtgtccactggagggttaaattttagaatttggcttatttccattggtttctgtcttaaataggatggatattcttttgtgaagttttttcctaggagattttgttgctatctcagtgtcaaagattgttaaactatgaccagctgcctgaaatacccttacaggaattttacaaggcttgaaataaagaaaactgaagccaaattttcaataagtcttttacacttaattattgagacaactgacatagttaaagaggacaaaagaaatattaagcactcagaaaccttaatgttgaaataatttatttttataagacctacatgtctgtagaatagataaactgtggacaaaaccttctcaagcaaagtacattgaaacagagagcattactgttttgatgaaatattccttatcagaaaaatgtcacagttccttgaataaggctgtattgttaaagtgaaaggaagtcctttctattgaaaacacccacactctctggtttaatggctacttgaccactatacataatgcaaaaacatcagtatggatctattaagaatagggccctttataattcagtcatattaaatagagaaattagaactgaaataatgctggaaggaagtaagaagacataggttgagtcctaattctcctgtttaggatttacgtactttcaattccttactctaagtttagggataacaattcttcagttgccttcatgtgtaataattataccaataaaaactaatacaggtcaatttttaaagtttattgaatccctgcataaaaaactcttgtcacctggaattacagaacttttttatttttttttgtttttattcagtccaaagcatatattaggggaacttagatagacaggggtctttagcctccttgtgatgaagagtgagaaaagagatgttccatccaggtatgtccctaatgggctagctaggttatatgagggttgcaggaatttggctcaggggtcatggataatttctatgagcttcaagcaacaatctcaaaagctttatcagtgcctggaaatgtttaagaccccatcttgggttcaagtctgcagggggaaatatgctgctgtccaggttacagagtggtcagggcactctgtttcttggtcaggttttacaataaaacttaaatgacacaaaataatataattggtcaaattgagaattttatttcaaattcattttctttcctgcaataacgtagcaatagtcttaccatggttgtaacaataaattaatatattttaataatgttaggcagcattattttggcagcaaaattgtgattatcaatgaataactctaatacctgatgtcataatataaatacacatatatgccatatataactacacatataatatacattaaacttatagtatatataattttatatttaacataatggacatacagttaacattatatacaattaaattattttattcagagaaagttatctgatgagcaatatatgatccatctatcgatccatcatccatccgtccatccatccatccatccatccatgcattattccaaactgatgattaatttttaaaaagtcatttattgggaatttagacaggggaaagtaattaaaggaaaaagaagttctgctttggcattacagtaatttataaattctaaaagaacatttttcttaaaaacatttaacgtgctgaacaaaatgcaacacataatgtattaaatgtattgctaatctaagcttacaaaaatgaattttcaaagacaaaaacaaggaaagaacaaaatgaaggtcatatgcatgagctaaaactggtcattaccagaaggggattgacaatactagagtttacagcagcctaaagtatgagaaacaagattgtgttcccataagttaggagaaactaaagacatattatgaaggggcagtgcagggggcttaaagagatacactcacagtaaaatgataggaaatatacctgtcagagtcttagctcaaagttgaaaactgtcttcggtaagaatttgtaatgttaactgtacacttatggacacttggtttagattcacactgcctattgactggggacaatctcaaaccaattacttaagttaaattgatttccagtgggaaacatcctggaagtacgtggaagaagcaagttacaaattaaggccaaacaaatgtaagttcaacatttaaaaatggttaaatataagaaataaagataaatgagtaatttcataaattaggcctctcagaaattcagatatggaatttatccaacataatacaatgtgactattattaaatgactattaaagttgaaatacagaattgaaaataagagccataagcattatactgtgaaacattgttaggaaaaaagaaatgagcctggctgcctattatgatacttcaaaaaatgtaagatagatagataatagtgataaataggtagaattatatatatagaatgatataggtatagagagattacatagtgatatgagaaagagagataaattaaaatctcaaatgatagtttgaaccacaaagtagccaacaaagaattaatacagagggaaaataagtaataactacaaaaattagaatataatagtttatattagtagtagatttatattatatagcacaaaaaatatagcacaaaatatagcacaaaaaaaatgacagaaaagagattgaagaaaaataggacaaattaagaggcattgaggacacaataaaattgtcttcataacatacaccaaattggcagtcagaaaatagaaaacaggaaaaacagtgaagctttaatactgaaagaagaaaagagacaggagaaaaagggaaaccttgtcttttcaaagattctgaatgaagtttaaaaacaattaattaaatgaaatttgctctgagacacatcgtaattaaatttttggggggagggcttgtgtgaaaagagagaaaagaaagatgacttaccatttcaaaaattaaaaagtataaaaatgattctatatatattacttacggatatcaatagataggtatagtgctttggcttcacactaacccagtgaaggactaaatgttattttcccagttaccagtgagtaaatttataccaaaagagtttctaaaatgtatccttagttatgttaattactgtcccagctgagctttgaactcatgcattgaaatctgagagcaaaaagctagcattagaaggcttttctgttggcactactctagctcatccctcatgaacttttctgtaggaggacaggcaatttgacagtcctagtgcattaggtggtacaatctagtatgattctgaatgaagtaagcatcacaaggatgctaaagtccttcctctatgtaacttcccctaataaatgctttgaactaataccaacaaaccaacaaaacaaaacacacctctgtaattccagattacaacagttcatactttttacatatttttatacagggattcaatgaatcccttttaaggcatgccaaaggaaaatgcttactaagatttacttattcttgtataagtagaggttggggaaaggaacataataaaatacagtaaggtgataatagaacatcacaaagtatttaattgcatcacgtacattaatgatatcacattattactgaatttattttaattctaaatgttttaaaaatttgagacaaaaaattgcctcttgctctacagtagagagattgtatctcattttttttgtaccccatctaaaaatttaaattgttataatctttacactacacataaaaaattttatatcactgagtattacttaacgtagcaagtctagtcctaaatttttacaccaaacaaggcaaaacaccaaatcattaatgaaaaataggaaatatttaaaggttattttgtatattattttaaaataagtgtattgtatgcagtaacccaacatcagaaaatttgaagaaaatgtgcatagatttggctaaaatatatgtgagtaatttaataaaccatgcatatttcaaaaaaggacattgattaaaaggcaatatagtgccagaaaacaaaaatctgaaaatttatatgccacagcagcattaataaccataacataaataaggaaaatatttaaaaaattctaataaaattagacaaaaaatatgattaaaaatgccaaattttcaatatcttaaaatgtctaataatagtcgttattgtttatatttaataattccaaaaatattatttttcaatgatagtcttttacatagaaaacagattacaaaatggcaactctattatgatacttaaaaaaaattatcttatgtgtgtatttgtggctctatgtggcggcagaaccaaatatgcatgtacattacctgtctgtccttaagaaaacattcagaaggataaacctcaaatactagttatgtcatctgtgtgtggtttcatgtctatttactgctagttaagaaatgcttcagagagggaacaaaaggcaaacagatgtataacttgcccaaagatacagcataagttattagcatggagctggaattaaaagccagattttcttgatgtagttccaaagcctatttaccattatgtttagcaataacaggaagtaaaatgactataaaactggtctgcaacgtaagcatatgaaataattaatatcacaaaattcctaaaataagacagaaacattttgctatttcagaatagtggcatcaacttgaagcattttgatacttcagaatagtggcatcggcttacaaaagatatagaaaaataaaatttacagaaagcaaaccaaaaacaaaattgtcttgagatttatagttaccaacttttacaattagtcttcatcagctattcactatatttgtgatgcaaattttcctatatgccatatgtgtattggccagatgaatagtgattaagatttagaaaagaatttaacaatatttatgctaatctctcaacaatgtaattggaaaagacttgtttaattataaaacttatggaagtaaaacatccatctgtgcaatcatatttgtagtttttgaagtaaatcagatacttttcaactataaccacaaagggtcaggtaagtaagaagaaataatacaaggcaatttttaaaatgaaatgcatagaaatatttatataaaaaatgatcacttatatcaggtgctatattaacattttaaagatctaaattcatattataccaataaaaaagaagacataaaatcaatttatgtctcctatgaaaatactgtagtcattaacattataatggcttactttatcaacactcttattaccaaaataagtgcattgagtaacctctgatttttaaaatcaataaaatagttaaattatttagtggttatttatatttaaaagtgacttagagaaaaaacaattatgtcaagtcctcacagggcaatgtgtaatagtagaaatgtgtttcactttatgaaacagtcatgttcataatagactatgtggatataaacctcctgaaaacattacatcacattagggaatttacactataaatgagtctgaattattttccaaagtgaagaattatttcattatgaatatcaaaatatgcacctcattgattaactcatattttattatttcagatttctcaatgtcctgagactatttctttgaatgattgttgccttattaacataattccctgatcttaaacacataacataactttgtgtgtattgccaattgcaccagcagatgtttatgttctaacaatttattgtaatgctatcgtgaaatctaaaattttttgtggaatttttaaacaatgacaaaatatcatgaccaactaatttaaatggtgatgcttactacatagttattatgtcaacacgaacctgctggcattagatactcactctctccattgaggtaaaaatctcaataatagtccataattaaagaaaaatgttattagtcctatacaagtttgagcatttaccatagggagaactgcagcaaagagggaaggaagggaggaaggaaggaaggaaaagaaggaaggaagaaaggaaggaaaaaaggaaggagggagggagggaaggaaagaaagaaaagcttaaactctaattcttcaacttatactgacttcaattaatcctactgatatgatctgagtttgtccccctacatttatgtgttggaaacttaatccccaaaggaacagtgttagaggatgggggctaatgggatgaacttaggttatgagggttctgacctcctgcatggattcatgctgctatgaacagggttggtgagagtgccttctctctcttttgcttttctgtcatgtggggactcagtacttgtcctcttttgtccttcgccttctgccacgtgaggacacagtaagaaggcccacaacagatgctggtgtcttgatcttgccagcctccagaactgcgagagaataaatcttaataaattacccagtatttaatattctgttatggcagcacaaacagactaaggaacctggcaagtgaagagagttgacaaattatctggttcaagcctctaattttgcaattgaggacattgatatgaagtatggaaagtatctaagatcattcagccacctagtagaaaatgttttagaattgacttcactactgtactctccactgtaacctatcaatacaaactacattgtcttcctccaaaatgtatacgttgaagtcataacccctaatatgactatatttggagacagagtctttaagaaataaagttaaatgagatttgaagcatggggcctaattaaatgtgactgatgtctttataagaagggaaagagacatcagggattttgagcacagaaaaaaaatgttatgtgaggacacagtgagaaaacagccatcagcaagctagggagagaaacctcaggagaaaccaaatctgctgacatctgaatcttggactttgagtctccaaaactttgagaagtaatttttgtttgtttgttttaaaacacccagtctgtgatattttgttaccataaacctagtgatatatttgctctatttattggatgtaacttatttcttgattttgtctatttcatcactctggtattcatctgacctgacaccatgcttctgtcaggacaccatctttgtgtaaattctgttctgtgcctttcgatactgaatctatattctgatgcttttagtatataattgtaatacaggtcttttggattgtgaaacagggctctaccatcatccacaggtaactactttatttttgggaacagctcttggtttgttactaggtttcagtagaacctgaatgcttcgcaataggccgccaagttactttgtgacctgaactgtccattgtgaactgggtgttatctcacccaccaaatgatgaagttgggcatacacagcaatactctactggaaaattgaatgacatatacatgattaggcctatggaaaattatccagatggtcttggaccaatctagttcttcctacattcttgctcttagttcttaagaataagtatagaacgtattgagaatgcagtatcctgagataggaaggaactgcctaaaacatcctgggccttgtttttgtcccttctgggagtgagacatcttgagttatggaggaactgtccaagacagcacagtctttgttcctgtctcacctggaaagaaggatgtccttctaagcttttcccagtgatccacatggcccctggagtttataacctagggtggctgcctttcagggcccttcagctgtggtacaggtggctcagtgcagtaaagactccatctgtcccaggcagctttcttactcaaaatggatcctagatttctttcatcccttgctgccaatctgtacacaattaatcttcctgtctcactggactctaacagtttggtagccagtgcacagagaacctgctccacagggcccacacagaccctgaagacacaaggcagatgaaaaaggtgcccaaatgcccacagtctccattcctgctaaactgccttttctccctagcctacacctgtggcctcatggggaactctctaaaatcagttaacagaggaagagaagactcaggcctggtttatggatggtgttgcatgacatgtgagcagtatctgaaagtggacagctgcagcagccacagcccctctctgggacatctttgcagaacattgttgaagagaaatcctctcggtgtagtagtacatcaggttgtgcagctgattgtgcaggttgctttaaagaagaaatggccagagatatgactacataccaattcatgggctatacaaattgtttgcctgtatagtcaaggacttggaaggaaaaggatcagaaaacttgggacaaagaaatctggggatggggtatatggacagattatttttgaatggggaagatatttgtgtcccatgtgaattctcaccaattacctcaagaggaaaaatttaataatcaagtggtaagaatgatatgttctggagatcccactcaacctctttccataccaccctattgtcaccctatgggcccatgaacaaagtagccatgatggcaagggtatcagttatgcatgggctcactcaggatcatgcacttcccctcagggaaggcatggtaattctaacagacactgtgagacttctactcaccaatggcaacctgtattgactcctctccattcccaatctatcagcagccaaaaccagcactgaacccccaatatggcatcattccctgggattggcagccagctgcttgatggcaggtcaaatatacagaacagctttcaacatggaagggacagtgttttgtttttaatggagtagatgctctggatatggatttgccctctctacgtacaacgcttctgccaaaattacctttcatggacttacagaataccttatccaccatcatggtattctgtatctcattgcatcctatcaaggaactcacttcatggccaaagaagtgtagaaatgggctcatgatcatgaagttcactggttttaccatgctccctaccatccttaagcagttggcttgattggatcgtgatatggcgtttttaagactacgttattgtgttcattaggtgataactggggcacttgcaagtatgggataaaattctgcagaggatcatatatgctctgaatcagcatctgatgaaacaggaaacatggtgctgtttcactgatagccaggattcaacagtctaggaatcaagaggtggaaatgagagtggccctactccctattactcctgttaacccactagcaaaatgtttgcattctgtttctgtgactttatgctctgctagcctagaggtctttattccagaggaaaaatgcctccaccaagagacacaacaatgattccattgaagtgaaggttaaatggcaacaaggatgctttgggctcttcctgcctctgagtcaacagaacatggagggtgtttcggtgttgggtgaaataattgatttaaactaccaaaggaaaattggacttccactctacagtgaagaaaaggaagaggaaacagaaggaaaacacgagatatcttaggatgtctcttagtattaccatgctccgttttaaggtcagtgaaaaactgtaacaacccaatccatacaggactaaaaatggcccagactcttcaggaattaagatttgtgtcatacagccaagtaatgaatcatgaccagctgacctgcttcctgaagaaaaaagggaatacagaaggagtagtagaagaaggtagttataaataacagctatgacacatgaccagttatagaaaaattgaaattgttatatttcctccttattttgttatgaatatgttctcgtgtatatgtatacatattgagcaaatatctttgttttcttattatcttatcatgtaacataagatatattgattttatattagtatttaaatattgttaattttacatcaaagcatttaagctatgagatataaggagaaaaattaatgttattcgtggaccttagctactcttctgtggaaaggattagtgcattttgtgttataaacagggtggttgactcatgttaggtagaattctaaccttgttattgtctgtatttggagattaagtatggtttaaggaaatgtgtgtgggtgccaagttgataaggggtgaatttgtgatggttaattttaaaaaatgttcagaagagtggtaaaatttatttctggtgatgtctgttagggtgtaccccaaagagaataacatttaaatcagtaggctgagataaaaatatttccctccccaatgtgggtgagcatcaaccaatgctttgagggcctcactagaacagaaagaaggaagaagggcaaattcagtctctgtttcagctgggctgtccatcttctcctgccctcagatatacgttctgctaattctcaggcctttggactcgggctgaatttgtcatcagcttgcctggttctccagctttcagacagcaaatcaaggaactacttagtgtccataatcatataagccctaattctcatagtatatcaattattatgatttgatttctcaaatgtctctctctctctctctctatatatatatatattacatatatatatatatatatacacagtcaacctttctctattatatatatgtatataaatatctctcatatgagttgtatatttaacttctcataataaatcaatctctctatatagatgtatatatatacatattatgtgttattaagaattattagaaaatatatctatacatatagatatatagagagaatatctacatctatatcataaacacacacacacacatacatatacacacacacacacacacacacacacacacacacatatcctgttggttctgtttttctggagaatcctgtgatatggtttggctatgtcctcaccgaaatctaatcttgaatggtagttcccattatcaccatttgtcatgggagggcccaggtggacatcattgaatcatgggggtagtttcccccatcctgttctcatcatagtgagttagttctcccaagatctaatggttttataacagacatcccccttcactgggtactcattcttctccttcctgactccatgtgaagaaggacgtgtttgcttctccttccatcataattgtaagtttcctgaggcctcccatatcatgctgaactgtgagtcaattaagcctctttcctttacaagttacccagtctcgggtgtgtctttattagcagcatgagaatggactaatacagtaaattggtatttggtagtggggtactgctgtaaagatacccgaaaatgtggaagcaactttggaactgggtaagaggcagagattggaacattttggagggctcagaagaagacaggaagatgtgggaaagtttgaaacttcctagagacttgttgaatggctttgaccaaaatgctgagagtgatatgacaatgaagtctaggctgaggcagtctcagatagagatgaggagcttgttgggaactggaataaaggtgactcttgctatgatttagcaaagagactggtggcattttgcccctgccttagagatctgtgaaatgttgaacttgaggtgatttagggtatctggtggaagaaatttctaagcagcaaagtgttaaagatgtgacttgggtgctgttaaaagcagtcagttttttttttttttttttttttttttttgacagagtctcattctgtcacccaggctggagtgcagtggcacgatctcagcttactgcaagctccgcctcccaggttcatgccattctcctgcctcagcctcccaagcagctgggactataggtgcccgccaccatgcctgcctaattttttttgtatttttagtagagacggggtttcaccatgttagccagatggtctcgatctcctgacctcgtgatctgcccaccttagcctcccaaagtgctgggaaaaagcagtcagttttatgtgtgcacaaggatatggtttggaattggcacctatacgtaaaggagaagaagagcataagagtttggaaaatttgcagcctgacaatgagatagaaaagaaaaccctatttcctgaggagaaattcaagccacctgcagaaatttgcataagtaacaaggagccaaatgttaattgccaagacaatggggaaaatgtccccagggtatgtaggaggtctttaaggcagcccctcttatcacaggccctgaggactaggagtgaaaactggtttccttggctggacccagggccttgctgctttgtgcagtcttgggacttgactccctgtgtcccagctgtgggtaaaaaggccaccgtactgctcaggctgttgcttcagagggtgcaagccccaaaccttagtggcttatacatagtattgggcctgaaggtgcataaaagtgaaggattgaggtttgggaccctccacctagatttcagaagatgtatggaaatgtctggctatctaggaagaagtttacagcaggagtggagccctcgtggataacgtctgctagggcagtgtggaagggaaatgtggggtgatagcccccacacagagcccccactgggccattgcctagtggagctgtgagaagagggccaccatcctgcagaccccaaaatggtagatccactgacagcttgtaccatgtgccagtaaaagctgcagacactcaatgcaagcctgtgaaaacagctggcagggggtctataccctgcaaagccatgaggcagagctttccaaggccatgggagacaactcctgcatcagcatgacctggatgtgagacatggagtcaaaggagatcaatttagagctttaagatttggctgccccactggatttcagacttgcctggggcctttagcccctttgttttggccattttctccaatttggaatgggtgtatttaccaaatacttgtaacctccgttgtatctaggaagtaactgacttgcttctgatttttacaggctcataggcagaaggcacttgccttgtctgatgagactttggacttggacttttgagttaatgctgcaatgaagtaagagtttgggggactgttggaatgacatgattctgttttaaaatgtgaggacatgagatttgagagaggccaggggcagaatgatatggtttggatgtctcctcacccaaatctcatcttgaattatagtacccatatttcccatgtgtcctgggatagaccaggtggagataaatgaatcatgagggtggattccccatcttcttcttttgatagcgagctagttgtcgctagatctaatggttttataaggggcttcctcctatgctgggcactcatttgtcttcttcctgctgccatgtgatgtaggatttttttgctttccctttctccgtgattgcaagtttcctgaagcctcccaagccaggcagaactgtgagtcaatgaaacttctctcctttacaaattatcccatcttgggtatgtctttattagcagcataagaacaaacttttacacattactaatacattatcaattcaaattcatgactcttgcaacatcaactgtgaagttgattagaacttcatagttctaatgaaggaactgtggaagtctaagcaactctttgttacagaaaagtaaagaaaacatacatgagacattagtttgtaattgggtaaaaatactaaacacattaatttcaaaatttaattctggatatttcaataagaaaagtaattttattaaattttttttggcattcctctatgtaaatatacaagagaagtcacaatttcttctagcaaataagagtcataaccaaaaactattgatgttgctacataactgagaatctgagaatcttgccgaagataaaggaacacaaattaggtgcatgttaataagcctttgataatagacaaaggattttggggttttagcctggatatagtatggtgctagttgcagatgatataaatgaagtgaaataattaggcaagtatttagaaatgtttggcagcaatgtgaaggatttaatagatggcaacagactaatgtccagaaaagataagtatttcctgtagttgtccagtgtcaaagtgattgggctagtactaatgcgacagaggtaggaattttttttaaaaaaaaaaaggcattggattttttagttactaaagaaatggtatcaaagaaattttgtgaccaatttgatgctgggcataagtgagaagaaagagcaaacaataatcttcaggttcctgccatgaaccactgggcaaagttacttacaaagaaaaggagagcaagagaaaaagtacaaaaatctttcatcacagaagataagaatctaccttttccaacacgcttcaaatttcgttgtgtgctgttgaatttgttagttgaggaaaaaaaaatgaaaggaatgtgtactaaaattcaaaacatggtaagagtaaatgacataaatgtttatagaattaaatttcaacatattttctgatacaagcaatattcttcattagtgagttttatggtgttacagaataaaaattatagagtatatctataattaccaagcatggtatttaatgcatgcccaataaaacagattttaccgttgtttccaaagtgcctcgtgagtttcatttaactgtgaaaataccttccagttgtcaatattcataaaaatagtggcttatccagagttgccctttcaatatcaaaataaaattaaaacaaatggtaaaaatgcagattattcgcaaaaagagaatgataattaaagcctccaggggtttaaccataatgaatcagaatgacaaaatggattttgactttctgctcagaactggcttagaaatctatctattaaaatattgtcaggagattactctgtcagaactggataagaataaaagatgtgagcacacgaaattacagctttgcaatttcaaagtaatttaaatctgatatatttcttttaaattttattccacaaaggtttttttccaagctgaaaattattctaaatgatatggtttcttttaatagtgaccttgaaattatattacccgaatcagttacatccattatttttaaaatttattgtatgatcgatgtaaatcagacattcccatgcagatatatctggttttctacagttaaaaaaattagattactattagtttaatacgttatttctatcttcagcatgcactttatccttttctgcatctggtatgcacaattagataatgtatactgaacagcatcaactgtaaaatattcaagaagatgaattgcttcatataaattagagatggtaaagcttgatcagttcattttaggttaatgcatcttgagagtccctctataattctataaaatataatacctgcaattatacattagaagtaaatcatcctaaaaaatgaatagcgtagaaagtagtatgtcactccttcattaccgttaaataatgtgtttttataacttgccaatatggattttatagagtcatttcagcccaaatgaagacctattcaaactatatttagattcttaacttagtattaattttttatgaaaaaacattttattaaataaaacaatctctaaatattacttaaagctataaaatgttttatacatatgttgttattattatcagctagtgctagggaaaaacagagaccagattttttttaaattatccattattctttagcattgaaatcaagatttttttatcttgtggtttatcacagaatacactattctatttcgattagtgaaaatttttattttaaatatgtttattcatatagtttggtagcatacctaaatgactaaatttcaagcaatattataccattaactgttagattatgttttccttttggaatttttcatctagtcccttaaaataagatttttatgggggaagggagaaacgttatgtacgtaaagctgaaatatttacagtacacatttcaaaagtcacttctgaattttgaatgttttactggttataaatactatccgtgttgtcatttttgttgttatttatataaaattatgagcaataatctagaatataatataatatagagttaggaaaatataatcaaacaacttgatatgcagacatctggaaatcagttagactcttctaaataaatcttatgatcttgtggtagagaagaagtaatttcacctccttagaatgctagttcttagtttctgctcttcaaatactggagcacagaataaagatgtctctgcatgaatcaagaattattttgttgtttttgttgcttgttgtttgtcttttaatctaactttttcaagcaatcattgtatttagccgaccactaaatctaaagcctacatttgtgacttgtgtttagaaagatgatttgaataatgattttctagaaaataacaaggtgagaaaaatgttaaggctatagaaactattggaaacatcttttctttctttctattctaagactaaatatttaccatcaagaaaaaataagatggaagaagaaatctttggtatggtgtaaaccaaagtatgaatccatatgaggaaatcaagaccaatgtaaatgacttcctctttccagtgttcatgaataaaatttcatctaccttctatacatgatggttctatctggctagtgtccaaggacaaagaccatcatttttactactgatgtttgtatagtggcaggaagataaatgagtaaagttatctgtttcttgtgaaatgatgaagtattgtgaacaatatgcatgcccaaattaacaaaaacatgttacataaaaataaatgaaatgaatggaaatccagacaagagcatggactcaagaaaagggtagggttatatttgaagcaggagatttaaaaatatggaactagacatgattctcaaaattagttatagcgcattcttttgaaatcaaatgtactgaggtaaaggtaatagagaattaagagacttagatctagaaagaatgtaaatgggtttacatagactataaatcaatacattttatttattttgtttagcctatgagtatatggagagttttcaaatgttaactggagtcaatgtcagtggtagtgaaatataataaaatagagttaagtggttgcctgaaccctcctgcagataattattatgaaatatgaataaaataatatttgaaagtagtattgaatgtcttcaaaacagacaaaagagagaggatattatcttttgaaaaactgcaatcaaatagtctgtttgtggctttcttacttcatggtattttctgaccgttatgatcagagtagccaaaaatcagtcttaccactaacagttgacagagaatattgttcatgaataaaaatacaaaagaaaatttaagggcaaagttctgaaaataggggatcttcagtagacatgatatataaaatctgaatataaactgccgagatgcgttacgtaccagtaaagtacatacacggtggacgttacaggggcccatagcaaaaacacatcaggcaaggaccaaacacaaaattgccactgacagtaagagggatgccaggtaatgtttgtaattctttgttgttgtttaaactaatgcattcctcagtgagtgctcagctcacgggattgaaagagggagtcttgcacaattgatgtgccagaggacaaaacctgatacaagaagagcaggtggaaatttaagatgcagtctccagaagcaagaaaattacagagaaagtgctcagtaatagctgagcatgaactttatccaaatccttaacaaacactcaaattacacatgaaagaggggacagccagggatttaggcttaaaaaaattatatttgcctctataagctgtaagaaccacaacaacaaaaagtgttcagaagaacagaatggaagacagacttgcagtgaagtattatttatgatggctagttttcagccaaaaagtattagacaagcatagaacaggaatatatgacccatattcaggaaaacaatgcagtcagtggaaattacgtctgaacaggaccagatgctacatttcacagaaaaaaaaaaagactccaaagtaattattataaacatgctcgaaaaatgaaagaaaaatatattcaaggaaataaagacagtcttcaggagttacagatacattatatggttatatgaatagagaaaaagtaaactataaaaattagaaacactctagtttagatgtacactcttaaaactaaaaaaattattgagtcatctcagtggtaatttagagatggcagataaaagaatctgtaaactttaggatagattaatgaatattcctccatccaaaagataaagaaaaaaggactgataaaaatggacacagtcttaatagacctttgtgataatatagggaaagcaaacaaaaaaattaattaagatcttaaaagaaaaggtatgtaaagtgcaggtaaaaaccaaacaaatatttgaagaaatactgtcttaaatttgttgaaaaatattatctttttttgtaaaacattatcttttagattttaaaagctaaacatttccaagtgggataaacacaaaagagactaattctagtcccacataaaaatgatatttctagtgtatacaggggaaaaagacatatgacccttaagaagaaaactaaaaagcaaatattattagatgacttttcaacagtaacaatagtgatcagatgccattagaagaaaatagccaaaatactgggaggaaaaacaagctgtagccaagaattctgtatctaatgaaactgtccataaaaaaggaaatatagaaatgttcacataagctaaaatatattgtattgggctcatttggcctacaagaagtgatagttcttcaggctgaagcaaaatgacagtgacctcttgaatctacaggaatgaaaaaatgaagacaaatgagtagcaaatatgtgggtagatatgaaactatgcagacacatagattgtctctgcttctcttaaattcttaaaagccattaactgttaaaagaaaaaattataaccattagttgcatggtttacaacttttatagaattaatttacatgatacaagagcatagagtataggtggtttataaaggatgatttataaattgcaccccattataaacatgaattactaatttgttaaatgtaagacgattacctgaaaataaagtgaaatctgtaattttagagtaatgactaaacagtaatgcaaaaaaagcaaagaagaaatcaaaatagagtacaaataaaatattcaaataacacaaaataagaaagaggatagaagaaataaacataaaaatgaagaaacaaaaacagataaaataagttgaaagcacttcaccaaatgacagacataaatattactatatcactaactttactgtcaacagaatattctattaaatatagagattatcagaaaaccaaaggaacaagactcaattatatgctttctacaagatgcacatacactaaataattgtcacaaatgggataaaagttgaagaaagggaaaatatgttattaacaataaatcatatgaaagctggaatagttttattaatgtcagaaaaaatggacattaaagtaaattaacagggaagagaacttaatcacaataaaagggtcaatatattcggaatacataaaaattataaatgtgcatatgcctaataagaacattttaaaatatgtgaagaaaataatgacaaaggaagaaataaacaaatctggaaacttagatggaaattttaacaccatatcccaattgttgataaaagaactgaacaaaaatctagtaaggtgatcgaacattttaataaccctgtatgtctaacagtgcactcaattacagattacattattttttaaatgcacataaaacgttcaccacaaaatattcaacttctgaatcataagacagctcaatagatttaacagtaaaatatttcagactttatttctttatcataaattaaattacactagaagttaaaaatatctagcagtcttgagtatctcaaaattaaacaattcaattcgaatcaatcaaagtgtaaatgaaggaattacaagatgaagtagcaaatagtatactaaatgataagaaaaactcaatgtataaacatttgtagaaaggtgcaaaacattcataaatgtaaatatatgaattcaaatgcttacattacaggttttatgaaaagaacaataaaaagttctaaaactatctaaattggtcacaaaaaaagaaaaaataggatattcatttttggtaaaaatcccaaaatacaaggtataaaagggaactccctcaagtacatatagaatataaagtatatttttggagagtaaatatttagaaagtgatttgatttggctgtatccccacccaaatctcatcttgaattgtagttcccataatccccatgtgtcatgggaggcatctggtaagaggtaattgaatcatgggggcagttactctcatgctggcttcatgataatgagttctcatgagatctttttaaggggcctattcactctttcgctcagcacttcttgctgccctgtgaacgaggccatgtttgcttccccttctgtcatgattgcaaatttcctgaggcctccccaggcctgcgggatggagacaattaaattgttttcctttataaattatctagtgccaggtgtgtcattattagcagagtgaaaatggattaatacagaaagatatcccatgctagaggactggacgactcaaatttgttaagatgctctattttcccaaatacataaaaagatttaatgcaatctcattaaaaattccagcaaaagttttgagacttggcaagatgattctgaaatttttagctaaactgcacatgacttagaatagtaagaacgtttttaaaataaagtcttatactataaacaagtagaacttaattagtaatttccaaatagttaacttaaaaccttaaagtagtataatattgagttatcgataatttaaattttgataacgacaataattttaatatatttctagtctcatttaatacattttactacagaaaatggatgtataagtaactttaggttatattaatatatgtgttcttatttaaagaaatgcattaaacattttggtatcaaataatgaatatttcttatttttggtttgtttacatgagtacaatgtacaccatttgggccatcgttacccaaaaagcccagaattcatcactacacagtatatccatgtaacaaactgcatatatacctcttaaatttatacaaataaaagagaaaaataatgaaaaaattatgttcctgaaagtatgaaatgtcttcattgttcaagaatatgaaagaagacattaaaatatattttgctagttaatgggtacaataatggagttggatagaataagttctggtattccatggcacaataggaaagtgtgttctaaatcaaaccacagattatctaacagtacagcaattttcctaaagattgcaactcccatccatcaacagcacttaaggattgcctagcgtttctccatcagcattctcatttactgcagaaagttcagttatccaattgcaagtaaaccaaatataatttaatagtataggaatgtttctagtggtctttggctttttatgttaatcaactaaatttgaaagcttaactcagcaatcaacaggaataacattgatatataaaccaatatttaacagttacatttttattgaaaaggaagccgcgctggttaaatttgactttcactttatgcttagatttcacacaatgatgtgctttgaggaaacaagggtatatttgagattagtcctaaggcttttcagaaagatcatcctttctttgttctttcccctaaggtaaaccatttccattgtcatagcactgacaaataattattttattgctgaaaaactccgactcagagaaaatgtcacaggtatttttttttaaatagctgttgcagtttaagctttcagaaattgctatataaaacctgtcatttagggggaaaataaaattttctgtaaaaacaattcaaaaaaatgtaattattcctgtgttcataaaacttcatagtagtgatgaacaatgaaaaatattcattctttcttaaggtatcaagtagtcacaaattttatttttcatttaagaattgattaacttcatttttcactaatgaattgggatatatagtgtgtatgtgtgccttgaagctgcaagttggcttttttattcgcttttggctaaaatttaaatctgaccaattttgaattttaaatttgaccaattatcacaaactgatcagttgtcttgtttttgtaaatatctacattggattatttcaatatgaaaatatttaaagtagactgaggagtttctgtattatagatctttagggttctggaaacccatcttgcaattgagattacagaaactctccattgtattaacttatgtaaatctgttataaacatcttttgttgatgacaatattatgactgtctctcacatttactaaatgggtgtaatatgaatctgcactcatttgaaggcatgcatgtgatgccaaaatcaatgagaatgtatgtaattacaaccttaattcaatggaaatttatctaatgatccgttatgacaaacagagctacatgtaacaagttaataataccttgtaatacataatttgaaggaaaatacatttttattatttaatattacttaaatggacagaatagaaataatagaaaccacatagaaaaataaatgaacttctaaaaattttataatacttttacatttttaaagttttttatctagaaatatttaacatgaattctgatatttaaaattgtaagtcacctctcaacttattttataaaaaactttgtgttttgttatactaaaaatgtgtttcttgcaaattacatttataagtttaatttttgcatgtcaaatagaacactatatttacacacatagttggcttcttgtctaagaccttgacttgatgaaatgattaaaacaattgtcttgcccagaacttgactattattaaaactgtttttattcaaacaacatacatgagttgttcatttttgtaacttaggcattcattttgaaattgataaacaaccaattaatatatgctttgacagctaattaaaaattaaaaacttcacatgtacataagtcagacattacctgcacaattaccgtatattttattttccacatggcaggaaagattcatttttaagtattttttggagcattatagagaaggactgtatcttctttcaaaaggattctttggagagataaatttgacaaatgtaataatctattgcacatgtggaaaacatcttcaccattgttttacttttttaagtggacttaaaccattaattaacatttctttggcttattccttttttaatgtgcattttactggtaataaaatatctaaaccgtgatgttattttgaagataaatacgctgaagtatgcatagctctattaagtagttacaaataacaagaagccctacaaacataggcttataaaattgggctcaaattctgttttgttctcttactacattaactttcatactcatgagagttacctcacagtttcaaaatgactatagctctacatcttttgcaaaggaggaaaggaagaatataagaaaaagagagcctgaatcagaaagggaaatgctttctccggaaatcatttatactgttccttgaccagaaccgtgcacatagccagcccaccattatctgtgatggattcaaccagataagtagttttaaattagtccattgttcttgcaaaacaaaattagaaaaggggggaaaaagagaatgaatatatggcaggcatttagtaaggtcttaccacagtggtagtacttagtgctattagtgcttaggggacatagtgaggcctaaatgaatactagttgttacaatcttgaaagagctctagtgcctgagtcagttttatagaggggacttacttgatatcgaaaatcagtgctccaagattttcacagaagacaatggaaaatttgcatctgttctccttgtgattgtttacaaggattttcactgggaatgagtaaaatgtaatcttcacatacaggttgaataaatagaactatgatacaatttaaagggcttcataaggcccctggttagaaaaatctgtcacttggctaactgtaattgggaccctcagttaatcatcctttaagttgtaaaatttcctttacaacttaaaatttctgcaaataaagcgcttatattttagtgtgaaataaaagtgagtttctagataaactcataagcaaagaaaatcaagaaatactgcaacttcacgcactgttagtatgtgcatctttctagcttgacaattctgcgtgtttagtaagcaaatgccatacatattttttctgttatatgtttccttcaaataaaatctgactgagaatctgtgatcacaaaataaagctgctaattatgagctgggtcaccttggatcttatctagggaaggaccactttctgtagaatcttatctataaaatgtaaataaattaaaggagagtatagatgtattatatgtggacatgcatactaaaaatgtatactgtttgaacatattcagatactttttagaaccgaactattgtatttagaatttacttcaattgagccttcctctttttaagtagactggaacattaaaaaaatgtttattcaggtaaactaaacacatatactataaaaacatatgtgtgtgtggagtatggggatgtacctgttatgcaacccaattaataagatatagggtagaatgaaagatcggtagagcttcatgaggatgctagttttgtccttctaaagaaaacaccaagtaacaagtcatactgtggatgcatctattgattaacttgcagaggtggtgctgagacacaggcacattgatcaaacttagcctaggactatgttaattatttttattgctcaattcagcattgtttgtatgtatctgtctcggcatgtgtgtgagtgtgtgggtggatgggaactacaataaaaagaatgaatagctctattatcattattttggttaattaaaaactgagacaagtcaaaatgattagctcttcctccatccaatttttctgttaacttgttttacaaagttatttcccaaccatgaataaaatacttggtgattgtttgaatgttcttgtcttccacaagctaatgctgaatattgatttaaacttttttaatgttcctatatgcctgagatacacatgatttgaatttttatgaatggagtaattataaaagaagcaatcaattataacaataaatcattcttttatatttgaggggaaaaagcctaataagaatgttaaagaataattatgttctttttgttgattttgttgtgaaactccttatgtctcctagtttttgatggcacattttattgtgtcactgaaagcaagtaccttaaaagatatttaaaatcctaaaataatagattctataatagacattgaaaatgtacttcaaccttctcattttacatatgaacaaataaatacagagcatttggagacacagctgtgaataaagtaaatgtcttctgtggtctttcttaatttattctaagaaagtttttccaacataatatataaccttctaaatctccttaaaacattatgtcattattttaaagtatatattgtataaataaatgtttttaagaaaatgatattctagaagaatatacttatgatattttattgcagtgtttattaacatttaatatttaataatattcagaatatataatgaaggtaaatttttactttccccaattttttctcagattaaaacttattctcccatataggtttttactttccccaattaaaaataatatattttattaaagttatttaataaaaagaagcttcaaattatctgttgtctaaactccatcacttcctctttcacattcatgttgtactgcaccaaaatttagtgccttgaaacaacattggtcaaatccacaattgtatggtttgacaattttggctgctggtcttagctagacccatgtatactagtgggaagctgctagtcagccaaaagactcaccttctggctcttggatgaaatgacaaggattactgaaacaatggtctcttctcacctagcaaattatcctggatttcttcatatggtgatggtcaggcatgttttaagaagaccaagaagtagaacaggactcgatgcaaaagcatttccaagtatctgcttatgccatgcttgctattgtctcattgctcacatactatgaggacaaccccatattcaacatgtaaaagcacaacccacatagcagggacaggagggcgtgaataaatggaaggtcattactgaaacaatctagtaagcatggctctagcactaataatttacctgcttcccacaagtaaagtacatttactctctcacaaaataccaaaattctcatataatctaagcatcaggcataaagtccagatttttgtgattcactgtgatgctggatatcagtgaggcaccatattgaaaaacatgttattttcactacacaaacacaacttctgatggtgacacagaatagaagaacgacaaaaaatgctgccatttcaaaaggagaaaaatgataaccacatgcatttcatgatccatagcaattctgaaacaaaattgggcaaataggtcatattttccagtttcaggggaaagcatgctccctgacgaagccatattccttttccagtgagcgacttcccatatttccttcatgttccctggctctaccctctgagatatcctttattttttttcatcctccttagatatttctggagagttcaaaggataatattttcttacagaaattttcttaacctattttcttttcataaagatgtggaatcagagaatttttggagtttgaacagtctcagtgcctttcgataaagactgccaacttgtttctgggcataactccattaaacacttggcaaattatctgtgagtctgatttctaagagttgtaactcgaaagacacatcagaaattctttttgagtaattgtctctcaatgtattaactgatacattgggcatttagttttcagaggggcaaatcttcaaaatggtgaattttgtctaattgagagtaactaagaagtactgattttattctttcagaagtcttaacaaaggatctcacatttaagccattgatctaatatattccattaagttgcactttgccttcaaatcttttaagtaccagttgcagtactgtacataaggggcttgagcagctgcagattttggtatttgtgggagagtcttagaaccaatccactacaggtaacaagagaagattgtaagtcatctaaggatgtataataaatgtagtggcttgaaacaaccaccttttgtttggatcgtagttctttctgtgtggcaatttgggatggatatgactgatttggtcttctcttgggtaggttcatttatgtgtcttcattctgtggccagatgcagttagctagttgggtatgtttctggtgattgttagcagccaactaggagcaggtgcactacatttctgtaacaattttacaggattcttctcatggaagcagtgtcagggatcctaaaaacagcaagaggaagataaaaccttaaagacctagcccttttctccagcctcaggttttgttatgactgctatcgtactactaaaccaagtcagtatattgtcagcctcatcagtgtgggtatgaccagctgagaatgtggatccatggaggtattaacaaactatggtacattactgcaaccctatatcaaactgactcccatttgataatcctttttatctcactgaacaaaataaaaacttgtagtaaagatgagaatttgcataaataaccattatcttgtctgttcaacctcagatattatatcatttgaaaaataattaatgataggaaagttgaaaacaaaatggcagtagtcaaattagtttctgtggctccagcatacaacccattctattttcttcagtccacgaatggcaccaccaacagttactttgcctcaagtatgggacaatgcagctaataccaaagtcctattcaaaagccacacttacaaagttaaagtaaattgagccttctatattcagttcttgtttccttacgctcttgctcctgtatcttaatgagtgttctattaattttgcagtgactttcttccttaatgttcatagcttaataaactctgcctactgatttaaaacctaatcaatattcactaagtgtttgctaattatttaaataagagcatgcataattttggggagaactaaatctgatgacaatttgatggaaatgtagtttattactgctttaggactgaggatttcattctgtgtgtggctcatttgtgggaagaattaatacatgttttattttaaaatggctaggattagtaaagaaacatccctgaaaagggggataacgacctaactttgtggatgtgattttttgtttgcttatgatttttatagtgaatataggctctgaaattaaacagagagatactacaactatggagtttttttaactgttgcaatctatgaaatggtatctctctatactttctcaaatagcccaatacttgagtattattcatagggataagtctttcctaaaattctcataacaatttaaaggaaaacttgaaaattctttaaatatctgcttaaaaatcttctactccatggatgggagcaataaatcagaagacaaaactctataaggttaagtgttttacaataactctctttttcaaatttattccagaagtatacatttcttcaccagcaaagctcttttctaaaggattagataaaattatagtgttaattaaaaataaattacttctacattaagagggtgatgaatttaaatgaataaaataatagcctatctggaaaattgagatagttacattccttttttattctttctcacgactagggcaactttccaaaaggggcatgctttggacttgggggcaactgagaagtatacatacagataataaatgaaaaataaagcacaaaagttagctttttcatggaggatatgctgtaactctgctgtcagtcattttaaaaattgtaacaactggaagagatgtcaactgatcaaatttccaagagctcataccttacatagggaacatagtcatattcacagttaattttaatagtttcagcatctttgacagcagtggaatgctatccacttagttcgcagatataacaccataatccattaaaataaattgcctgtaaaaggagctagtgttcttaaagttatgtaagtgttgagaaggaagaaggaaaaggagaaagaaattgttgcaaaaaatgtaccttattcatttctttattgagatcctcttttgcaaaatataaatagataaaagaaaaaataaaaattttcctgttcacagaataaaataatgcacagaattatcttacatctgtactatgaagtgggccattagagaccttctaaagtctaatacaagtaatgcaaaagcacaaaaggagattaactttgcaacttgacaaatagatgcaagaataagaaaaaaatacttaggacaattaacacaaaatacacatcattacagacatttagtcaatcatcatcatcatcatgaccttcctgcaccttccatctatatttttatatctacttggttccctcattttgtttttgtaactgatacagtcattttaaagaagaagttaatttattcaattgagtcagtgtttgactgaactcactgattgtttcagaaaatgttctgtaaatacacactgcccaaatgctgctgctttgacttattgtctcagagactcccatacatatttaagtggtcaaaagaagcatgtagtaaattttttatttctgacagtggcagctgctgctgctgttgctgcttcttgagtctacttagtttgtcagccattttcttctgttatatttcttttccaattctgtggtattccttccttatgtgtgtttatctcatatgtcaggattttgcttttattgtcattgctatgtcaatacagaattttgaaaaaatatttttattcagtataattgacatattttgactttgaagtttagaataactaaaatattaatgaatttcatttaatgatttattaaattaatatatttaatgtgacatgtttatatagttatagtacatcttttttttttttttttttttttttttgagacagagtctccctctgtcccccaggctggagtgcagtggcgtgatcttggctcactgcaacctccgcctcccaggttcaagtgattctcctgccttagcctcccgagtagctgggactaaaggtgcatgccaccacgcctggctaagttttgtatttttagtagacacggggcttcaccatgttggccaggatggtcttgatccttgatctcttgaccttgtgatctgcctgcctcggcctcccaatgtgctgggattgcaggcgtgagccaccgcatccagccattatagtacatcttataacaatttctgttctaggataaattttatgcatttaaactttatcacaaaaataatatggaactcatctgaccctaaaaggagtgacataggcaacattacattacataggcaacatagtcatattcgcagttaattttaatagtttgagtatctttgagtgaagagataagtcatccttacttgtgagagcaatgttgcaaacatcaaactaggctcacactattttttatgaaaggagattccatatgggaatcaatgaaagagttgaaaataagatttaatttaattaaaagaaacagaaacaatacattctcatacagtccaaagaaggtaaaaataagcatttgtagttcatgttgataattgacaaactttaaaagtatattcttgactcttattagttttaggttcaatcaggtcccagttaatattaaagttttacttaaagatatatcaaccatataatgctgttatacttattgttgccataaatggcctctcttttattcagagaccacactacaattttggaactggagttcagacccagggtgctccatgtctcctctaatattcaaaataattttgtagtggattaaatcattgaattcaccgcagatgacagataggtgatagatagatgaaagatagatagatagatagatgatagatattattttgtagtggattaaatctttgaattcatggtagatgatagctagctagctagctagatagatagatagatagatattattttgtagtggataaaatcattgaattcacagtagacgatagatgattgataggtagagagatagatagatagatgatagatatttaaagcataattatatatgctttaaaaactctaacaagaattatatacaaaaagataaaacgcaaagggcatatagatatttaaagcataaatatgaagtgaaaaaagattcaaagcacaaaagttagctatttcatggaagaaatatctctcctgtcagtcattttaaaaattgtatatgctttaaatatccatatgccctttgcattttatctttttgtatataattcttgttagagttttcagcaaataaaaattgcccaataaatactgttgaacatttgttcttcattacctcataccacctgcaatgataggattattctcatgaatataattaaattattattggcacattataagtaggctttctttaatgtaatttaattagtgcaatccaaatgcagaggaaaattgacaagctagtacagaatttaaaataacagactatacaaaagtatagaggtgtatctgaagctgcttttgaaagagcttcttcatctctctcaccagtgaattgctttaacagccccttccttggcatattttaatctaatcaactcagcagtgcagttcttgggaaccagtatgtcagtgatgtgtgccatgtttacatttcagaaacataaataaagataataaacattgtgatttatttaagtagtcagcaggtactatgacttgttattctctcctaattaaataaaataaataatgaaatagaaaataaaattgtttaatcgcagaagcaaccaaatcatggaggtagattcattctctatttctgtgtagaaattttttaaagggtatgttgcataggttattttttgagaaaacttttaaccttacacactagaatattaatttcttatttgaagaagagagaatgtatttgggattatgtatttatttaacaaattttttaatgcttgccattttcaggtcctttgtaagtccccatgtattcagaaattagtaaaatataaaagatctttgccatcttggttcttaagggtggatggtgatatggtttggctgtgttcccacccaaatctcatcttgaattgtagctcccataattcccatgtgttgcaggagggacctggtgggagataattgaatcatggtggcggttcccccatgctgttccagttgtaatgaataagtctcatgaaatctgatggttttataagggtaaaccacttttgcttgcctcttattttctctctcgtctgccggatataagacatgccttttgccttctgccatgattgtgaggcctcctcagccacgtggaactgagtccattaaacctctttttctttataaattacccagtctcaagtatgtctttatcagcagcatgaagatgagaaagaaagcagtggaggtccacttcttgcaccagaaacggtttttattctatatattatcaaattctagcaagattttgtaacttactatgcttatataatttatatgtaaatataagaggtactgtcttttatgaaagaaataactagaaaataaattattttcaacataaacttttaggtttaattaattttaataaagaatgaaagtatgattatttgtataatatataattttatcttaaaaataatttatgtgtacattttgatcatttaaaattcgagccaacagatatttataaagcatatcctaacatcaatgctaaagacttattatatgaaaaatatcatctaacaaatatataaaagatacaattggttaaattaataatttaaatgaagttcttttgtattattcagtctctagacagtttgattgtatgtagcaagctgcaataaaatgctttaagaaacaaattaacattcttcagacaaagcccgtactaaacctgaacataccgaatgacttctagatctgggaaaagaaaataattactaaataaacaaaattgcatttaacactagggagctgctttttgacaaaacttgtgatatgaaagtagctattgttctcttagtcatcagatgtttcagttgttaatatactttgattatgaaacttagagaacatggactttccatatgactgtattcttcatatattttaataacttcagtatattgcaaaatttgaaaactgtattctttatattttgtctagtgaagaagaaagacctaagttttatttactggtatatattcaatccaataatatgtcatgtcagttaatatctggtatgtaaataatttactttcttaataataattctattttttgggctggctgcattcctatagagtcaacttattaggtatgaatcactatttatattcaacaggatttttaaatgtgttaaataaaatttaaaataactgatggatataaccataagcatgccatttgaaattttttgccttttaatgagtgcccaatactaaattattcgccagatattcttaagtttagatttgtaagcttaataagaaattatttacctttgggagctgtgattcatagaaagatatttaagtaacacaatctttagtactaataccattaatttcttaaatgtcagttaacacctgcatgatataccttttttaaagaagacagtgactgttgtgaataattttcatgcatcaatcaaattacatttcctgagttgcatgtgtcttatttgaataaataatatagagccctgggccaaaccagtagcacaattatagtttacatataaacccaaatctgtatcctgttatatagtacacacctttttctctggtagtaattgctaaaatctgaaaactaatccttcagttttctgccattctctgtgggtagtcagatggaaatagcacaatatggttccatcatagggcagtgaatattgtatatttgatcttaaaaataaaataggaaataaaattagaataatgagtattaacaaaagaaagctaaaactgaagctttgcaaaaactgataaatgaaagtacctctggcaataccattccataaaatattaagatttcctgaattgaaatttttccaaatatcttgggtttaaaaaatactgaaaagtttggatttaatgtatacttatatactaaatgtctaagcatccagccctctccacatacttagttttcatagctgctaatagccagttctatatattatgttgttaggattctatcaagttcaataggaaattattaaagaaaataagaattctccagggaaatgccactgcccaataaattataataaagagtactgctagcaagccaaaataatgagtctagagcattctgttaacaactcagaaactcaaatttaaatacaaaccaaatacaagcatcaacacacatctttgaaaacctactaccatgaaagatagagactaaaacaaacaaatggaaaaaaacaacttgaagggaaggagattctattaagacgaagacactttcacaactgaattgttcatatcaaagaagcaggtgaaaaattatagtcaatggaaaatgaaacaaaaacaataacagggcactaaaacatggatggattgaaagaacaaaaagagattctggatactataattatgggagcctgccactccttaggcgttaatcacagaaaaatttacatttccattcatgcaaaaatatttatacaaatattcatagcagttccatttgaaacaaccaaacactggaacaacccaaatgtccttcatgggtaagtggtgacacacactgtggcacttccttgccttggaataaaactcatcaacaaaaaaggagcaatctatgaatgcatataacaacttggaattctcaagagaattatgctcaccaaaaaaagcatcacaaaatgtttcatatcatatgactcaatttgtatcgtgttcttgaaataacatagagatggagacagattagtggctggcagagattaaggattgaagaggaggagctggatatgatggatatgactataaagtggtagcacaaagaaactctgtggtgatgaacaatttggtatcttgatggcgatggtggttacacaatcctacacacatgataaagttgcatgaatgtacacaaacacacacattgcttataaaactagtaaattaggtaaattagaataaactctgtggattatgcatatgtcagtgtattggttttgctggtgcactatagttatgcaagatgttactactaggagaatccaagtgaaggatacatgaaacgtctttatatatatatatattttttgaaattttcaatgaattgattatttcaaaataatattttagaaatatggtaggctaaatttttaaaaatactatttttggaaatagtaataaagtgtgctttccaggaaaagtataacagtcatggacaatgggaataattcagaaccagtccaagatgttcaataactgaataacaactaactctaatggcagaacaaaaaacaaatagagaaagattattctgagttacaactggcacaatagtttacattttctaatcaaaaattacttttcattgctctccaaaatgaattttgaatataatacatagtgcctacttataaatggcttactctcagtgggagtcagcaaatgatggcctgagagccaaatcttgacaaccacctgttttgggaagtctgcaaaaattaaaaaatgcttttaaaaaataattttactgaataaagacaaggtgatgtatatatacaccatggaatactatgcagccattaaaaagaatgaggtcatgtcctttgcagcaacacagatggaactggaggttattatccttagcaaattaatgcaggaacagataaccatatactgaatgttcttgcttacaaatgggagctaagcaatgagaatacatggtcacaaagaggggtacaacggagactgaggcctacatgaaggtggagtgtgggaggaggggaaggattaaaaaaatgtccatcagttactatgcttattacctgggtgatgaaataatctgtaccacaaacccccatgacacacagtatacctatataacaggcctgtacatataaccctgaacctaaagtaaaagttaaataataataatttgaaatcattacattataaatggttatataaatacctacataatatcttcaatttttttatctggttagcaagcctgaaatttttaccatctggccctttaagaaaaaaaatctgctaacctctcatctagaggaatctgagaaacagatcttctatagagataaggtttagatgatgccagagagtaacctaattataaaaattaaaagttatgtcaggtaggaaacatcttctccattccggagagggacagcttttttgacattggtaaacaaattaaattgagaaacattcagaaaattcattgtaatttgaaaatcaaatgcataccagcaatagaatttaacaagcccagaatataccccgacacaaaaaaacaaaaacaaaaacaaaaaaaaacccagaagccaaaaacaaacaaacaaacaaaaaacatggagtttggtaattactttcatagaatgaaaagcacagtgtaggccaggcacggtggctcagtgatacgcctgtaatcccaacgctctgggaggccccgcggagtggattacttgagcccaggagtttgagaccagcctgggccacatggcgagaccccatttctaattaaaaagaaaacaaaaagaggaaaagtgtagtgtgtaatagttctgaataacttcattccacatccacccccaccgaattggttaatatctataattagtttgtttcatggtgtcaaagaaattttatattaaccaagaaattcaagaaggtcctcaaaaacctctttttgagcatgttttaacacaccaaaaattttcaaaggagaataatgtgtaatagtttattttatataagcaaaaatattttaaacatgtactaatttattaaagataatgtaaagtacagagagctagcacattctttttggtcaaatatgttttttcttagcattaatgatatgtaaaaccagaaccacaaacagtaactaaacacgttgatattttaccagatgacagttttacttgtgttaaaaacagaatcataaacagtaactaaacacattgatattttaccagatgacagttttacttgtgttaaacattaaaaatggaaataggctgggtgcagtcctcatgcctataatcccagcactttaggaggattgagcctaggagtttgagaccatcctgggctggtttgatgagtttgactccatctgttccaaaaataaaagtaaaaaaattggccaggtgtggtggtacatgcctgtgatttcagcaacttgggaggctgagatgaggggattgcttgagtccaggaggttgaggccgcaatgagcaaagactatgccactgcactccagcctgggtgacagagcaagaatgtctcaaagaagaaaaataataagtaaatacaaataaaatgaaaaataaaaagtggaaataagtatttgtaacaatagcatgtgccagaagattctgtttttcataggatcgtttcacaaatcaaattttccaaaatcagatgttaaaacagattttgagatacaaactgtttattagggatcaacagttattaaaggaagtgggtggaagccagattgggcaaaagaagtgcaaatgcaacaaaatccaaactattattggctgatccagcatcacggtttcaaagaaaatttggtatgaaatacaaaatgcatagtcattccaggttctataaatatttttctgagtacattttttaaatctcaaggagagatacaacttatacccaaaaaataacatttagtatgagaaaaatattttaaatatttactaaatcattgacagaatttaagattctatgagcttactaatagaattcttttagaataatcttttctcctagatgagagtaagtaatatgcaaaaaaaattggacagctaaacaaagcacactgtaattgcaacaaactcttctgattataaaccttccaatattttacttttccaaaatcaaaggaaaatgagcctgcatattttacctaaatgtgtaataattactactaaaaattgcactatatttaataagcctgaggagaccattcagttcagcattctgtgttaacttgacataaagatcacgtattcattaatattttgccacaataatctcaaatttcatacatgcaattagtaagaagtttccattcaataccaagaattgagagtaaaaccagactttctataattttgtgtttaatttgtagatgaaatatcataccaacatttcagttaaccttatgaacattttgcttaaatccttcaatattttgttttgaaacatgaatataccttctctgcaattataaattattcagtttacaaaggatcaatcacattgttgctttctttttttgaggttttaagctattttaatctggtccttcaattggtggtggttttttttttttccaaatacacatattcacatttctaaaagtcaaatggctcaacgaggtttttaccaaaaagtagattcctttttttcactttactcatttctcccttcccagagacacagggtttcaacttgttcagtactaactttcttctaagctattttgcattgtaagggagaaaatataatttcttttttcctctcatattttcttagttgagatattctcctgaaaactaaagtaagactaacaagagaaaaaccagaagtttattaacaggtgctgtgctcatcatgcaggagaggcctcagttcaaaaatatttctctctcaaggcagtggcttgggggcctggtttaagtagtatttttttttaagccataaatcctatgtaatgacaagacaaagtaaagtgcatcttcaggcttccaaaaggtgagaaaatgttggaaggtaaatttctgggaaaagtggtcttttcctagacctgctggtgctaccgtctctgagctgataagcaagcatcgtaaagagggaaaaggcagagatgggtgcaaaaagacctttttctttgtaatttgctgtcctgccatcaggaatttggagcaaggaatagagccttctttatctcagcactccctggtatttcagacagaaatattttggtttctttcagcatcaaataatgtgtaaatttcaaatacatgtcaaaatcttttttagctctaatctggggtggtagttagctgggtcttgggcattatgcccatcttgccaacgctattcatctctttcctggatagaatgatttttttttcttttcctattcctcatttagtcctaattttgggtaaaacacttctagttacttactaagggaggttgcatgagtggtaattttttgagattgtattcatttaattaaactctcgtatttgatagacaattgcttggatattgaatttttgccaaaccttattttgtttattttggatgcattgctccattaaactataacaaatcacatgtctgtaggcttcactgttcttacctttaaaaagtgttatctttaaaaagaaaatgcataaagaaattattacaaatctatgctaattgtaatacagtgtataatgaggtcatttgtgataaaagtagtataaaagagtgatgaaacatggcaatagaggagcaaatatttgaatattattgaaattacattcctattaatctgacttggattgttgtaaatcatgatgttaatgaaaatggcatacccctacaggtttagaaaatccagaaagggtacagcattcattgaaaggatatcaagtaatcttttttgtatatttcaaagtgaagtaaccagactgatacatccctagtgatgctcaccctcagaacctgtgagcatgttatcttgttatgaaaaataaaacttgcagatgtgattaagattaaggaccttcaggtgaggagattattctggtgatatgatttggctgtgtccccacccaaatctcaacttgaattgtatctcccagaattcccacatgttgtgagagggacctagggggaggtaattgattcatgggggctggtctttcctgtgctattctcatgatgatgaataagtctcatgagatctgatgggtttatcgggagtttctgcttttgattcttcctcattttctcttgccactcccatgtaagaagtgccttctgcctcccgccatgattctgaggcctccccagccatgtggaactctaagtccaattaaacctctttttcctcccagtctcaggtatgtctttatcagcagcgtgaaaatgaactaatacacctggattaactaggcagcctaatctaaacactttgactccttaaaagtgataatctttcctgagtgaagtagaagtatgagaataaggagagatttcaagtgtgaaactgcctcaccgtaaatggctttcaagatagaggaaggaagatgaaagatgagccaagaaatgtgggtagcctcaaacagctggaaacagtcctcactgacagccagtaagaaaagaaggatttaagttcaacaactacaagggtcagaatttggctaatgacctgtatgagcaaaagaacaatacctacctcaaatccttcagaaaggaaatacctttattttagtcctgtgagacctgtaagataatacatatgtgtagtttttggttttttgttttagtttttgtttttttctgagatggaatcttgctctgtgcaccaggctggagtgccctggcgcgatctcgcctcactgcaagctccacctcccgggttcgcaccattctcctgcctcagcctcccgagtagctgggactacagatgcccgccaccgtgcccggctaattttttgtatttttagtagagacggggtttcaccgtgttagccaggatggtcttgatctcctgacctcgtgatccgcccacctcggcctcccaaagtgctgggattacaggcgtgagccactgcgcctggccctacatgtgtgtagttttaagctaacaagtgtgtgatgatttactaaggcatcactacaaaccaatacatgcattttgaaaataaagatagaatacctatatgaattaacgaactggcatgaacagtgggaaggggtagtggtatcactgcttcatttccagagcaaatgacatagtttcataatttaaatgtggattacatttaaatagtgatgagagaagtaaagaatgtaccccagaaacagtttgaagttccaagaaaagtggatgagcattacactttcccagaattaaaaagccatcaatgtgactggaccagtatattatagtaaatgaataataaagtaaataatcatatgttgtcaagttctaaaattctctgtacctgctctaatgacttcttttaagcagatctgtcactatcagtttccattaaaatccaaacaaaaaaagagaacagtaataaaataaatatattatatttgtactcctaaagaaagaagctgagacataaaatataattttaaagaatgttcttgagccaaaatgaggaccgttgcccaggaaacatttccagattaccttggaagtttctctgtttggtctttgttacaggtcagtttttaagggcaaaaagggggacaagaagtgggctacagcaaagttgtcaggaattgttttacagaaataacattgattaatgattggctatacatttttaaactatagactatgagttatggtgtccagcatgtggtgtcgttaggttagtttgtagtaacttgtggcatcggtcagtctagagtccacatagcaagcagcttcagtgatgattgcattgctcaagggggataggagtgggacatgatgggtgtctcatttcagtgcctctctgggcctgacaacttaaagggggctcacatttctcagataacaagtttattttctttattattttcccttttggtcaaaatatttcctcttgaaagcaatcatgatcaaagtctgaattttaagatgtaccttgtcgccaagaagccttattcttggataatcctgtcgcatattggggaaaatgagaaaatgtcatggtgaggaattttaagactgtgcaaaagccaaattgctattaaagagtggcaaaaatgcaaccttagttgttgatttacatagctgctattacttgttgaatcatatctagtcttcaaagtaccatgattttggtttccttagaagaagtaaaatgaaagatacatagcattaataagtttaatagtagaaatattatgcacataaggattgtaatgaaaaagataatttgtttgggaacctattccatctaagacccaactaaaaactaaatgaagtaaactaaatccagtttcttctttgtatacttgtagccaagtggcttctttgctaaactttttctggaagagtttctacttttataggaagtatatatatatatatacttcctataaaatatatacttcctatatacttcctataaaagtatatgcttctataatatatatataacaagaagtatttatcaccaagcatacatctccttgcccagtcagcatatagcctaaaaaatgcaactctctagtacaaccttagccggttaatcaatagctttttgttgagctgtgatggaggttacagtttcatcacaatatttcctaaagttataaaaaaaaattattaccatgtgttcatggaaagtgacacccaaccaaggcaaaaaagcattctcccaattaaatgcatgtaactatcttcttgatggctaggcagataatgagcagatttctcccaaatagaataaccatcccgaatagattagtggtcacacctaaagaaaagtttgagggaactagtctagtgttgtggttttttcagagctatatgtacatagagaagggaactcatcagtttgttgttttttttttcatagcaatagatatagacagaggaggaagagatattgcttttcattgtttcatgctcttagacgtttataggcccatcaactagtatgatgtatcctaagagattatatgtagaataattttaccaaaaccagcaagagaggagtcctatcatacgaaagaggcctaaaaacacgagtatactcgtcaacacaaataggagaccaaatgtttcaggtggagtaaacattagaatcgtgaggaactgggtatacagcccaggtttggtatcttggcagaatggcagaatcagactacctcaggtgtcagctacttgatgccttggtcagaaagactgtgagtcagcttcagttaaccttctccagtgacggaagatgtctactctggtggagttgcttttttttttttttcttttgagacagggtctcactgtgtcgcctaggccggaatgcagtggcgcatctcagctcactgcagcctcgacttcctaggataagttgatcctcccacctcagcctccccaaatagctgggactacaggaatgtgccaccacgcccagctagttttttgtatttttagtagaaatggggtttcgccttgttggccaggctggtcttgaattcctagactcaaacaatctgcccacctaggcctcccaaagtgctggaattataggtgtgaggcacgcacacggctgtggttatgttttctttcttttcttttcttttcttttttttttttttttattgagacagagtcttgctctgtcgtcaggttggagtggagtggcgagatcttggctcactgcatcctccacctcctgggttcaagtgattctcctgcctcagcctcccaagcagctaggactacaggcgcccaccaccacacttggctaattttttgtattttttgtagacacggggtttcactctgttggtcaggctggtctcgaactcctgacctcaagcaatccacccaccttggcctcctaaaatgctgagattacaggtgtcagccactgcacctggctggggttaccttttctaatgagaaacatgaatccataagtcaatgtccttaaatctagcagcacaggaattggtctacaatacctgatatggtccattccaatggtgttagagggaatcttttacttaggattgtctccagtaaatgaaatctccaagttgtaggccatgctttttaggtcttcatctcccagaacctcactgtgaaataaatatttaatttggagttcttagtgagaagttttgtgagaccttggcaataatcgaggatatcacctttaagaagtataggctctgttcgttttgcttaagatcatcttggcaacgtgggcttttttttggttccatatgaaatttaaagtagttttttttttttccagttctgtgaagaaagtcattggtagcttaatgggaatggcattgaatctataaattactttgggcagtatggtcattttcacgatattgaatcttcctatccatgagcatggagtattcttattcttccatttgtttgtgtcctcttttatttcattgagcagtggtttgcagttcttcttgaagaggtccttcaaatcccttgtaagttggattcctaggtattttattctctttgtagcaattgtgagtgggagttcactcgtgatttggctctctgtttgtctgttaatggtgtataggaatgcttgtgatttttgcacattgattttgtatcctgagactttgctgaagttgctgagcagcataaggagattttgggctgagatgatggggttttctaaatatacaatcatgtcatctgcaaacagggacaatttgatttcctcattttctaattgaataccctttatttctttctcttgcctgattgccctggccagaacttccaacgctatgttgaataggagtggtgagagagggcatccttgtcttgtgccagtattcaaagggaatgcttccagttttgcccatttagtatgatattggctgtgggtttgtcataaatagctcttattattttgagatatgttccatcaatacctagtttattgagagtttttagcatgaagggctgttgaattttgtcaaaggccttttctgcatgacttcaaactatactacaaagctatggtaacaaaaacaacagggtactggtaccaaaacagatatatagaccgatgggacagaacagaggcctcagaaacaatgccacacatctacaaccatctgatctttgacaaacctgacaaaaacaataaatggggaaagtattccgtatttaataaatggtactgggaaaactggctagccatatgtagaaagctgaaactggatcccttccttataccttacataaaaattaattcaagatggattaaagacttaaatgttagacctaaaaccataaaaaccctagaagaaaacctgggcaataccattcaggacataggcatgggcaaggacttcatgattaaaacaccaaaagcaatggcaacaaaagccaaaatagacaaatgggatctaattaaactaaagagcttctgcatggcaaaagaaactaccatcagagtgaacaggcaacctgcagaatgggagaaattttttgcaatctacccatctgacaaagggctaatatccagaatctacaaagaactcaaacaaatttacaagaaagaaacaaccccatcaacaagtgggcaaaggatatgaacagacacttctcgaaagaagacatctatgcagccaacagacacatgaaaaaatgctcatcatcactggtcatcagagaaatgcaaatcaaaaccacaatgagatacaatctcatgccagttagaatggcaatctttaataagttaggaagcaacaggtgctggagaggatgtggagaaataagaacgcttttacactgttggtgggagtgtaaatcggttcaaccattgtggaagacagtgtggagactcctcaaggatctagaactagaattaccatttgatacagcaatctcattactgggtatatacccaaacgattataaatcgtgctactataaagacacatgtacacgtgtgtttattgcggcacttttcacagtagcaaagacttggaaccaacccaaatgtccatcaatgatagactggattaagaaaatgtggcacatatacaccatggaatactatgcagacataaaaaaaggatgagttcatatcctttgcagggacatggatgaaactggaaaccatcattctgagcaaactatcacaaggacagaaaaccaaacactgcatgttctcactcataggtgggaatcgaacaataagatcacttggacacagggcggggagcatcacacacttggccctgtcaggggtaggtggctgggggagggatggcattaggagaaatacctaatgtaaatgatgagttgatgggtgcagcaaaccaacatgacacatgtatacctatgtgtcaaacctgcacgttgtgcacatgtaccctagaacttaaagtataaaaaaaaaagaagaaaaagtgtaggctcatgagttccttcatctagtttcataggcttccttgctattatttcaaaagaaaagagctggtgttttccaaatgaggcaatcatagtttgagcaggactgatgggagagcctgtggccaggtagtgttaaaaacttctgttagttttgccagttgaggttttactatgccattggtgtgttccaccagtccagaggatgtgggctattgggggagatgacagtgattggtacaaagaaagtgttggaaaataggcaaaatgttgcaaatggatcaaattacttgaccagtaaagcatgtttctcagtcactatggagctgagataaaactcctcatgtagcaattatcttttctaataacaatttacttactgcttaagccatagtttgtcagcataagaatgcgtcaatacaatgagagaacaaacaaattaccacaaaaacatacccataaccctgagatggaggcagctgggcaaagagtaattgttgtaacttaaagggtcctacaggtaaatgaaaatgtccacatgacccatgaaaggattttccaggattgtttgggacaaacactacagtaagaaaaaacctgtgcaacagtagtgggtagttttcaataatatggctttcccccttgctattattatgtccggattcaaatgcaaaaaggtaattgaaatcctaaaggaaagatcagtttatccacaccatgagcctaattctgggaaaaatttgccttttttatttttccagtcgtctattttcttctgagggctgttgtttgtggtttcttaaataaaactttaatgggtaataagtctgtaaggacatttcaaagcatttattgtctaacataaccctcaaggcttcattcttagctacagcatcagtgaaatggtttcctttactttctggaatatctagttttgaatgaccaagaactttaatgatggctagatatttggggtttggattacttccaagaggtcgaaaatttgttgacaattttggtgaattgacctgaagaggtcagaacctgtgttgcttccaaagcatccctcaaaccataagctaccgtgaatgcatatctgctgtgagcacaaatgttagccatgttattctttgccaactgacaaactcaagttagagcaatcaattctaccaactgagccaattttatatatggaagaggattatcctctataacctcagttagtgatactatggcataactagcccaaaatttttcagatttcatctttcaaattacaatcatcagtgagccatattatactggcattatttatgggcatctctcttaggtcctgtctatcagtcagaaagagtgatgcaatcatatggcatcctctcagtaggcaagggcaagagatttgctgggttaagattgttatagcaaaatattaacattaggtgaggacaaaagaagagctttataggaagccagtcatttaacagagtaatgttgggtgtgatgtgagttcagaagaatttccaaacagcagagtacaaatggtaaaaggggattccctaactatttcttcaatagccttaaagggcaaagtgacggcagagattgctcttaagcatggtggtatccctgtagccactgcatcaagttgctggctgtagtatctagcaggtctattttgttccccatgtttctgtgttaggactcctaaggtgtttccctgatcttcatcaatgaacacagaaaactgaaggctatagtcgagaggccctaaagcacagaaagttgcaagacttgataaattgtatggctttcattccctctggagtccaaacaagagaatcaggctggttcactatcaagagggtatgtaaaggctgagctattaaaaaaataggtatccaattccaacagtgtccagccaattccagaaatccttgcttcttttttgaatgcgtagggaaggctagaattcgtttaatccttcagcaagcctttgttacaaatcaagtgtctcgtgtattttacctgcatctagcaaaattggagtttctctttagaaattttgtgtcccttaaatgacaattgttttcatagatgcatgctgtcattcttagaggtttgcatattcagggaataaagaaggacaccatctacacattagatgagcatacattccctctagtacaggggtccccagtccctgggtcatgaactggtaatggtcgatggcctgttagcaactgtgccagacagcaggaggtgagtggcaggagagtaagtattaccatctgagctctacctcctgtcagatcactggccacattagatttttacagaggcgcaaaccctattgtgaactgtgcatgagagggtttgaggttgtgtgctgcttgtgataatctaactaatgcctaatgatctgaggtggagcagtttcatcctgaagccatccacaacccccaccacgccccaccgccagtccatggaaaacttggcttctgggaaattgatctctggtgccaaaaattttggggacctctgccctaacaaatgtacattaaccaacttagatttcaagatttgaaaaaatacaggaattgctctcagtataaccttggggcatgatggtccaggtatactggtagtcatctcaagtaaaagcaagtgagtattgactccatgggcctactggaatatcaaaggaaacactgcataaatcaaccatggtatgtatatatatacaactttcagtaaggactgctgccaaaagaatatgggcttttggtaccaccagatgtcttgggatcacaatgttcttgacagttctcaaatgttatacaaaagtccagcccctcctgtttggcttccttacagaaaggatcagagtattacattggctggtgcaagaaataattagaccattttaaatatatcttttattatgggtctgattccttcaattgctctaggccttagaggatattgtctggtaaaggtttaataaggtttacttctactttactgagggtggattaatatattttaccaaagtaagtagaagattgggatgaaaagtggtctggcaaagcttgcaataagccatcaatgtcattcattagtcccagttcagaaaaaaaattgtttgaactatattttttataattttagtgttttcattcttagtctgtagttgttccatttgctccttctattccaaatttaactatatttcccccttttgtgagaaggaaattagtgtattatgaaattccaaaaaaaatctctgcccaagagatgtatgggagccaaggcaacaggccgaagggaatgaaggccactaaatgagcttacttaaaattctcagggtttggacttatatacagtcataggttcattagataccgctaccatttcttacagttttattactctaagaaaggagacagtttaaagtggtagggctgagaacagagagagtagcctcagtgtctatgagggtacacatctgttttccatttgtggaaatttccatttctcctaatacatctttgagaccttagttttttcttctttctgaatagttttagaaagttgatctcccacacttcctaagttatgggtttgtatatctgcaaagttaagatggtattatttaaataaggtaaccaagtcttcatgtaagccattgaagaaagcagaatttataagaaaatcattctgatgaccttggaggctagcatcaggcatttcagaatattgtttaaatgtttttttttttcaagctgttcaaaataatccagcacagattcatctggctttttagagcattgattaattctcctcaaagctacattatttggaaaggtctggagaatggcatcacaaagagcctgggctaaggtgtagacaccttcatggttggcttcagtctttttttaaaacatcctatgaggtattgttctaagcttgccattttcaaccattcagtggccctgtcttttgatgccagcgtgtgaactaattgataaaagtcagactatctgtgttcttatgtcctgacaattaaatgaattttttttttttttttttgcaaacactatgggatcttggagaagctctgggaagtcttttatactattcttaagttcagtctttgtccaacgggtgtgcataataggaggctcacatctttctgcaggttttaccttgaaaggggctgcaaaaataggagtttcagaaaggatgtcagagatgtagaaaatttcctcaggtggtcagggagatagaattgaaggcaagtaaggacaggaaagtttagatacaagaagatataaaggttcaggcgtgggtggagaaggagcagtggaggtggaagggagaagaaggtctcctaagtgaagtcctttttaattcagaaatagtctcagatatctttttctttatctcctgaatggaggcaattttttcaacctttttagaagcttctacctgccattagaagtgagtctctcattcaatatttctggttttaaaaccagtttttccggttgtacatgcaaataattttgtaagcatttcaaaagacccacatttcagccactgtagcttatcaccaacctgggccatgggggtccatttttctagatatttacaaaagaacactctttaagtattttacataaaaccaaatggtgtttttaaaggagatcatccctttaaaaagtgctcatattttgaagcttgattttccataatttaagaacttttggaaagcgtccaaggctgaaaacatgctttgggtcaaagtatgctgcctatgagcatcactccccagagcgtcacctaaacatcatgaattgctatattgggtgtctcagaatttctggctaattacagtggcagtggcagagtgctcagagtgccaggtgaccaactcttatgtgcactttctggctgagctgaaagtccctccaggttttcttttttcagggaagccctataaggctgctatacatcacagccaaatgttgaggcccctctgcaaagtctgtagtctcctagagcacccaaatgggtcgggggagcaattgcctcttctcttttgaatagaaaataagcctcataaaatacaggggcagaatttggttacaataagaaataaagcaggtccagaaaagcattacttcaaaacaattgttcagatagagaaaatccatcagtgttcactgtttaaccaataagccaaacttctggccaaaggcaaaggtagaaaaggcagcttttttgtttttgttttgttcctgagacccaaatataccagatggaaacctccattctagaaagggagggttggaatagacagataaagaaaagtctagacatcatcaaagagtagggaggtcagaatccagaaggactcattccttacactggataatgctgtcagaggcagaacacaaggggttctaggtgaccaggcatcaagtccagaaagagtgttgcatggtgggatggattgctctgaaccctgcttgcagtgtcagaaatgttgatctaaataatgaaattgagtgacaaaataaaattttggagtttacttgagccaaagtgaggacagctgcctatgaaacacttccgggttacctcgtgtattagtctggtttcacactgctaataaagacctacccgagactgggtaatttataaaggaaagtagtttaatggactcacagtaccacatagctagggaggcctcgcaatcatggtggaaggcaaaggagaagcaaaggcacatcttacatggtggcagtcaagagagcatatgtaggagaaccctcatttataaaaccatcagatctcatgagacgtattcactaccacgagaacaggtatgggggaaatcgcccccatgattcaattgtctccacctggttctgcccttgagctttgggtggggacacagccaaaccataacaccttgtgaagtgcatttttcagcttttgttacaagcatgtttttaaagaaagcagggaaagaagtggactgaaacaaggttgtttgtcagaaattatcattggtttacagaaataacattaattagtgattgactatacattgttgaacatagggtatgaattatggtgtccagtatgcagcattgttagattaatttctagcaacttgtggcatcagcctagagcccacatagcaagcagcttctggagatgaatacttaactcaaggcaagggagcaaaacatggctgttgtctcattccagtgcctgtctggatctgataatttaaaggctcccatttctcagataagtttcctttcttcctcattttggagcttgttgccttttaataacttaattcccagtaacaatacagaatgaaacagctgagcacaatgtgagaaataatctacaacagtttttcttcatgtagatgagaaagaaacctcaaagaatacaaaaatttacttgctaaagatcatgctgttagctaatattagacttgcaagaaagtatccttttctgatatcaattttgatgatttcttaaacagtctgactacctgctgcataaaacctcttcttctacttttttaattacatatttatcttttctgccacttctctagtttaccgtctttttttacttttaacaactaagcaaaacaatatgtttaacttgtcaaagaagactttgacaactaaagatacaatactgtttctttgacttctgatgactcctctaataaatgtacacatcagtctacctcacctaataagtaaatcattttggggtataattacagaacagaaaatgctgctttaaatgttgactaggatgggaataactaatctttataattaaactgaaagcttttcaaagagttcagttccttagactaaggcttcccactgctaaaaagtaaattactttggagacatttcagggatctgaagtcttttctcagattcatagggacacacagagttctccagtacacggccccagggagagtttcacttctgaacagatgctaatgtttcatgcaatttagcagtggatatggtaatgaaacaattttatttaactgtagactagaagggagacacaacctgcatgatttgataatgttcaaattgaaactgccttaaggagatggaaattgacacatatctagcgttgtttaaaatttacaaagtacttaaaatgtctttttgtcaataaaaatgttctttacttttatctgtatttggcgtgaagtttttatcattctaaccatattgtaggtggtgtggcaaaaacaagagatattgttttattggccttctgtgtctattaaatgattttttctgtgggaaaatgtctgataagaaaaatacatattttaaaataataagatatcataactaaagaactggaaagtatcatatgaaataaccttttcttttctatgaaattttctataaactggctcaaaaatgtatcttaatgaatttgtggttttaaatgactgatattcacacttcttgtaccagaaaatcatgtataagaaaatgtcctccaaagttgcattgttttcttttcctagaactggctagataaaaatatccagaaaacactgatgttgtctacagcaattatcaattattaacatatcacgactagaagccaactgtaagaagactaaactgatttttaaaaataattttacattttccttatttgacaccaaataataaaccactcatatttataacctggtctccattggtatattttcatgttctgtcaattatttaaatttctatgtgtttactagggtttgtggtgtcagttcttcttcttctgccataagaataataaggggatcttaagcgtccctgaatgttagaatttgattgtgttataatgaggagaaccaggaacaaattgccattttaatgtatcaactgggaaaaacacagatgggactctctaataggcaattatgaaaagtttaaagaaggaataattgacttgagtggccagggatacaacaaactaagagagaagttaccatccataggacagaagagtcaaagggtaaaataagttttaatccagagggaagccaggagcctgggctttagaaaaatcacccaacaatagctttaggctttggagagaaacggccactggccaccctcatcgccctatttctattatcccatatcctatcagtatcacctttgcaggtggcagaatatgctaccccaaaatatgtcatttggcataaaaattactttgagttaaaggcacttgaaaaataacaaatgcaagacaagaactctgatgtgttattttcttcctgaaaataggagatgaaactgtcaagtgaaagatacccttcttgtacccgtaggaaacacacattctctctctctctctctctctctctcacatggtgagatgtgagataagatgaaccatcttatcaccagaaacagggagttgaggcccaggaaaatctgtgcaaataagtcttattaagccaacttttatctttgtagtcacttctccataattaactgtcctagtccaagcccctctgtcttgtcacattttcataattcactactctgtcttacttagtatataagcatttgattctactgcttctttgtgtcttcattttcctgtgtgggattccatgtacatacaagaatatgtatgcttttattttgctaatataacttacgtcaatttaattctcagtcgccagccagagactccaagaggataaggataaaattttgcctcccctaaactcccatcagctaaacttagtgaaataaagggcaaaaaaatccctgttgatttcgttcataagttcagtctcctgggacataatcaagatgctgaagcatcgtggagactttatctggtagagaagataaatatagtctacattgggagaatgaaattttatcagtcccaaggttttcttctactttccttcttttctttttttttttttttttttgagatgaagtctcactcttgtggcccaggctggagtacagtggcacaatcttagctcactgcaacttccatctcctgggttgaagtgattctcctgcctcagcctcccaagtacctgggattacaggcgcccaccagcacacctggctactttttgtatttttagtagagacggggtttcaccatgttggtcaggctggtctcgaactcctgaactcaggtgatccaactgcctcagcttcccaaggtgcgggggttacaggcatgagccactgcacccagcctttttttcttttttatctactctattttccaaacatatgatttggaaatttgagataaataactggtgcagctgtttttctctgggatccagcctgaccacagagaatatgtgatttttatttgctatgctggtctctaagccttgttgacttataccagtactacctctgacagcttggctaagtttccttacttgtaaattcaaggggtcagttagtttttacgctaacatatgtcctcctacctagttctatcataacagaggtaatgttttctccttaatattgactccttatttcaaatctcagcctcttcaggttttgaggagaaaacagagatgatttgtattggaaaggccccagggaactctcaacgcatgcatgacactcaatgttgtacttcattgtcatgattatttggccttctcgatagagttataacatgtttactactctccttggaggtataaaaaatgttttgaaatatgattgaagtggagttagtcatagagatatgaaaaccagtactcttccccttacaggaagaaaggctactacaatgtcaatcctcaaaagactactgttgtctcaaaatgtggttgtctcgtaaccttcatcaacataaaagagaaaagaacagaaatactgtgaacaaatttctaaaatatttaaggaaatttttgataaactttcaggaataccttaaaaagctatgggatcaggtaatgtttactagtaaagcaaatgaaggtgtatgtattcataatttgccttacagaataatttttctatccaataagaatgattatcatcaagcccaatattttcttgttcatcatggggaaaataaacgttaagttataatcatttaccatacttaatatttaatattgggtatatttctacattgtgtcatgtattgaggtttacatgatatacaatacaatgatatacaatgcaatgcacttttaagtgtacaggccaatgtattttttttttagacagagtcttgctccttcaccaggctggagtgtagtggcacaatatcaacccactgcaacctccgtctcctgggttcaagctattctcctgcctcagcctcctgagtagctgggattacaggtgtgcaccaccatgcccagctaatttttgtatttttagtagagacggggtttcaccatgttggtcaggctggtcttgaacttctgacctcgtgatctgtctgcctcagcctcccaaagtgctgggattacaggcatgagccactacgcccggtaggccaattattttatcaaatgcatatacccatgtagccatgaacacaatcaggatatagaacttttctattataccaaatgtatcctcattcctatttccagtaaatattttcacactctggcattcaggcaacaagtgagctttttttctgacactatagattagtcttgcttttttatgatttaatatatatcaaaccgtatgaagttttttcttatttcttttactcagcaaaatgtttttgatgctcattcatattgtggtgtgtatctgtagtttgtatcatatgattgctgagaagtgtttccttatatatagatttgtcacagttttcttattttcctgctgatggacattatgtttttccagtttttgattattttaataaactgtttgtaaactttcatgtacaaatatttttgtggacatacatttcatttctctttaatcaaaattgagaagtagaaatgcaaggtcatatattaaggatggatttaactttctagaaactggcaaatagtttattaaagtggttgcaccatttttacaaccccactagcagcgtgtgagagttcccatggcattacagatacttaatactcgcaatgattattactattgtcattttaatgtgtgattagtggcatcttatttacctctcacttatttgactaacatttagaaaaatgttcttatatatttacacaaatcattttaagatgaatgtttatttgttaccaatgagttgatggtatttgacgatttacacaaatatattgctgtgcgtgaattaatgtttctttttgattatggtaattttcaaaattaatccctatcttctcatatttcttgatgttcaacaatctttactactactgttaaatgagttaccagttgtttaacatactatatctcagatattcttccacgggaacacatattaactcacttgattttcagaacaactgagtcatagagaagtttagaaagttgaataaatgtgtttgttttactgttgtatatgtgtctgtttatttacctatatagatatatatatacagttgtcctttggtatccatggaggaatggttccaggatgctgccaacactaaacttagtggatcctcaacttccttatgtaaaatgttgcatataatctatgcacgtactcctgtatattttaaattatccctagatcatgtatgatatgtaatcaaatataaataattgttaatagaataaggacaaaaaaggtttgtttgtgttcagcatggacactttgtttttcctctgaatattttgaagccacagatgaagcaccaatggatacagaggactgactgtgcagatatatgtacctgcctatctctactttaaatgtcaataaatctcccacaataagaatgcaattatttataaatcccactaaaattttatcctcattattacacacctctgttccatgtggctctcaaagggattgtaaatctttccattttgccacaggggaaagtaagcatcccagtcgtgtcaatcaccatacttctttcccacattgacatttactgaccgatcttagtctttcccccggaattttatatacagagaccagatgtaagaaatagttctctatagagtccaaaacaaaacaaaaacaaaaaccaagagagtgtaaacctggaacattatatgattttgtctcccatctctctgcttcatgaaggaaatcagtacatgaaaaataaagctaatttagaaaaaaaatcaggttatttgtattggggcatgtgatatggtttggctctgtgtacccacccacatctcatgacaaatggtaatcctcattgttggaggggggtcctgatgggaggtgatttatttatggaggtagacgtcccctttgtttttcttatgatagtgagtgagtttccacaagatatggttgttggaaagtgtgtagcacctcctttggtctctcttcttctggctccagccatgtaggatgtgtcttctttcgctcagtcttccaccatgattgtaagtttcctgaggccaccccagccatgcttcctgtacagcctgaggaaccatgagaaaattaaacttcttttcttcataaattacccagtcttgggtatgtctttgtagcagtgtgagaatgaactaatatagaaaattgatgccagaaaagtaggctattgctgtaaagatactggaaaatatggaagcagctttggaactgggtaatgggcagatgttggaaaagtttggagggctcagaagaacacaggaaaatgagggaaaatttggaaattcaacttcctagagacttgttaaattgttgcgactgaaatgctgatagtgatatggacaatgaagtccaggctgaggtggtctcagatagagatgaggaacttattgggaactggaataatcgtcactcttgctatgctttagcaaagagaatggaggcattttgtccctgccctagatccgtggaactttgaacttgagagagattatttagagtatctgggggaagaaatttctaagcagaaagcattcaagatgtgacctggctgttcctaacagtgtacagtcatatgaattcagaaaaagattttctgaaattggaacttatgtttaaaagggaagcagaccataaaagtttggaaaattttcagcctgaccatgtggtagaaaagaaaaaaacacattttgtagggagaaattcaagccagttgtggaaaattgcataagtaaagagtaaccaaatgttaatagccaagaaaatgggggaaatacctcaaaagaattttggagaccttcacagcaagccctcccaccaaaggcctggaggcgtaggagggaagaatggttttgcaggctgggcccagggcacttctttcctgtgcaacatcaggacactgttccctgtgtcccagccacgccagttctggcgatggctaaaagggacccagacatgacttaggctgctgttccaaagcatgcaagctgcaagccttggcagtttccgcatggtgttaagtctgtgtgggagcagagggcaggaactgaggcttaggaacctctgcctagatttcagaggacatatggaaatgcctggatatccaggcagaggtttgcctcaggggcagagccctcaaggagaacctctactagggcattgcagaaggggaaatgtggggttagggcccctacacagagtccccactggggcactacctagtgtagttgtaaaaagaggtccaccatccttcagaccccagaatggtagatacactgacagcttgctctatgtgcctggaaaagcaaaaggcactcaatgccagcttgtgaaagcagctgtgaggaagtctataccctccaaagccacaggggtggagctgcccaacaccatgggagcccacctcttgcaacagtgtgacctggatgtgagacatagagtcaaaggagattattttggagctttaagatttattgactgccctgctcggcttccgacttgcagcggaactgttgcccctttgttttggccaatttctcccttttggaatgggtgcatttaccaaaagcctttacccccattgtatcttggaagtaactagtttttattttacaggctcataggcggaagatatttgccttatcttagatgagactttgaatttggacttttgagttaacgctagaatgtgctaagactttgggggctgttgggaaggcatgattgtgttttgaaattgtgagaagcacatgagattttggagtgaccaggagcagaattatatggtttgggtctgtgtccccatccaaatcttgtgtcaaactgtaattttcaacattgaaggaggagtgtgctgtgaggtgattggatcatggggcaagtttcctcactgctgttctcatgatagtgagttctcaggagatatggttgtttaaacatgtgtagacttcccaattttctctctctcctactgcagcaatgtgggacatgcttccttaaccttcgccttccaccacgattgtaagtttcctgaggcctccacagtcccggtttctgtatagcctgtggaaccatgagacaattaaacctcttttctttataaattatccagtctcaggtagttatttacaggaatacaagaacagactaatgtagtatgttagtttcacatggctaccaacaaagccccacaaattgggtaatttcttttagcataaaagaaatttatttttctacagttctggaggctagaaatgtaacattaagatgtcctcaaaactatgtatcctttgaaatctacagaggtatccctcctttcccctctctcacttctcacaatttgctggttatctttggcattccttggcttgcagctgagtaattccagcctctgtctatgtaatcgcatggtcttctccctgtgtgtatctgttccacatggccatcctcttatgaggacgccagtgctattggaataaagactcactatttcagcatgaactcagcttaattcattacatctgaaacaactcagttttcaaataaggtcacattatgaagtacttaaaggtaagaacttcagtatatctattttctctggggagtgggggcaaagttaaacccataacatggggttaggagaggataagatagtgataaatgggtaaatatttgaatctcaaagtccagttgttcctgttgccaatcataattatgaaatcccagatacaaaggctaatacattatattttttgctttagatagtttactccaaacaaaataatcctaacacatctgttttacttctgtagctgtaggcattcctgttgcttacaaccaatgaactctgccttattgtcgagataatcacattttgctgaatgcaaaatctgtgatgtaatgattttttttaaaagcctgctttaaagtaggagatcttattagtggatgagaccttgaccaataagactagaatcctttgctttttcaaggttctattagatttgagaatggatagagtgccgggaacgttgactctgtacccctttgtctctacctacaaactctcttctgaattagtcaaggaaagtttgtttcctgttgcctagttcagggcttctcacggtgcaatccaaagacctcagtcaccaaataatctgagacaatgtattaagtatatagtctttcatgccttatcctcaaactataggataagattctttgacaaaacttacggaatccatttatataaagttggtatccactgcagcaactacatgcatgaaacatcatgagtgaattgcaatgctttatcctaagtggaagaagcccaatcccaaaggtcacatatgtgtatgattaaattgatgtaatattcagggaaaggcaaaattatagagacaaagaacagatcagtatttgctgggactggggttgtggaaagggatttactaaaaagaagcatgagggaatgggggtgggtttgtaacttctgtatcctgattgagctggtgtttacaagactgtatgcatttgagaaaacagagaactataaatctaaagagtcagtttcacagcacgtaaagtatatctcaatttaaaaaagaaaattcaactacgtgaatgcttttatttccccttttactttcagaaattaatattgctggtagattcttgactgataaataatttaaattattgtaatttgttttaagctgtatctgtttgccttagaaagtgtccttttgtatttaattatttgtctcattttatgccttcacgatacctggtaataaaattatgatgcatgttttactctgtttaaacttgcctcatatcacattgtccataactttatatccaacaatccaattttacagaattgctctttctctctcatatatgtatacacatatatgtgtgtgtgtgtatacacatatatatatatacacacatatacacacatacatattcccccttgtattcagcattgaattaggactatttacatatccaatatgcaattctgattctttgcataagtaagtttaatatttttcccactacaagataaagaatatggaattatatttgttctttgtggcatatttaacccaggaaggggggaataatgaatatatcacatgtgtactttttttactgctaaaatatcctgcagttttctttttctgacagttaaaaaatacagacaaatctcattctatgctactacaattgcctatgcccatttgactgctttcctaaatgtgtttgacagtgttgataatctgtaggagatgtttctgtaactacaacctcacagacatttctgaaaataataccctggtacttaggaaaggctcatatttagttacatagtcccaaaacatgcatttcattttgtgaatgtagaaggaaccatatgctttattaaacttaatgatgaattataaaccacccatggaaacaagtaccagtgaggaggtaagagaaaatgggaagttaatacaaattaaagtgtaaggccatacatacatagaaccagctgagcctttgttttccataaagtttatatttaattttttatggtagtctatatttaagaaattcattttttgtgtgtgttctattttgacttggtttcaagaagagcattaatagttgatgtgcgtgaacccgggaggcggagcttgcagtgagccgagattgcaccactgcactccagcctgggcgacagagtgagactccgtctcaaaaaaaaaaaaatagttgatgtgattattctaaatattctaattattcttatatcatatttttcctgaatttgtattacatatttcatactaggtaaaagctactctttttttaatgaataataaatatttttagtatattgtgggatttttttctctgatgtaagattactgggaaattaagacttgaaagatgaccactctttttgactgttaaaaggaaatagctaactttgttctattatagctatgattatgatatagtaattttgcaaattcactgtatgtataccttgttttacaaacagttaatcatgaaggcctcaaatttacgtaatattctcatggaagtcagatctatttacttaatcatggtaaaattcataaagcccaaggagcagagcaagaagaaattacagaaattaaagagagtagaggaaatctgctctcatttaaagaagacatattggattattccattgtattgtactatctatactacattctcttcagtaccctgcataattacagtacagaatagctcttgtaaatatcgcctacaaaaaattctattattaaggtaaactcacatttgaaaaaataatccatttacaaatgtatgctattttccttgtaaatatcttgtatcacactattaaattatgaatcatggctgcatctaagcttaatccattgtctaaaaattctaaatatttctaattcaatcatattaattatttgtcatctttagatatgatcaattagtaaagaaagagaaaattgatggtaaaatgtgttatttaaaaaatactacgatttagcaagaaagccaaaaaaaaatgggattttaatgggtttagtagatctgtgtagtcaacacagagaaacactgtgctttatgcatccttttagaaactgttcaagacactacaacatttgacgaatgatagctgctaatgttattcaatgtaggattttctgttgctggaccttggctgaaggtcacatttgtaagtgaattggcgtaacatgaaagtaatagaagcaaaatattagtagtcatataaaatatttttaaccatagcagtggtggaataggaaactattcaaaggtgggtggggggaaagctagtttttatttatttatttatttatttttgaaacgtgggttgctgtgagaggataggctaaactattggggatgctttctgatatattagcttaattttaatactatgtgtagacacttggccctttgaattagatgtgaggtggcatgtatcttactctcatgataccagcggacaataggagttttcacaaaagtctaacatgtttccattctcaagagtgacacaagccagtctctgtctacatcactaattctacgatcctaagatcttttgctatcaataagggagtcctggaaatcagtaacaagtgtggaggccatgtgagtacactggcacttctcttcctacaagtgcacaattgaccaagggcccgggctcatcccttgaaaatatggcgtgaacccgggaggcagagcttgcagtgagccgagatggcgccaccgcactccagcctgggcgacagagcgagactccgtctcaaaataaaaaaagaaagaaagaaagaaaagaaaatacattgccatgcttgcactacgaccagcctcccatgagtgagtgcagtgcagatcctgaagcagacaatggtctgctttcctagaacactagactactttgaaaatgggcctttgcccaaggaatccctaaatttgaagaaggttccctaaaatgaaagacactctaacacacttttttattctcacttacgtggggtcagaattgtgttgtgagatctaaggtctcctttctatttcctctcacagccgtgcttcctctcataaattccttgaacattttatcctttcctggcatctgcttctctgaggatatagcctaatggtggagaattatgtttttgtttctaaagaagatatacaattttgatgcaacttcaataaaaagaaaatattctgaaaattctacttctgtgatattacacaattgaatttctttttcttcacaaacctatcttgaggggttatatcatgaagggaaagaaaccctttatatcaagaatatgagttcaagctttgctgggagttactacgttaaaatgcattgggccacacacatatagctacacatatacacacacacaagttttaccagtaagtgaagtgaaaactactaatgaaatattatgttatagataaataatataaattggaactttatagttaaaatgagaaagaccttacaggttatatagaccaactttctcacttcacatctggcaaaatgaagaaccagagaactgaagagatctacttgagtaaaccggttggtagttgcaaaagtaaatataaatatactatatatatatatatatatatataaaatatatatagcatttatatataatatatatagtatttatacatattatatatagtatttatatatatatgtatacttgtatatataaatataagtatatatacgtatataagtgtatataaatataagtatatactatatataagtatatagtatatatagtgtaaatatatagcatatataaactatatatatataaagagagaaacgtttaaatttttctcattaaaaatgtataaggcaccccagtagttactcacatgaaagttattacaattaaacctcaaagcatccctataagaaagactttaatatcattgcatccacttaattatctgggaaatatttctcaaagttatttaggtaacttgccttgggtcccacattacgaaatgccagagtgacgttaattcacatttcataagctaaatcttaagtgaagtttttatttgatggtctagagttctaggagcctcatttgacattaaaaaaagaagtctttaaaattctcctgtaaaatatacagccattttctgtcaatttatttcactggtagtatcagttttcatttaaatatatgtacaaatacattaaaatttttcataaaataaatattgcatcccttctttgcagaacttgttcgtggtatcctatatgtcaacagcatgtttatttggcagcaaactgctttggcatgtttaggtggaagcatgcagaaaattattagaaaataaagttctatttatcttgtattcttggaaactctttaaatatgcagataacatatgaatactctagatatctctttgcctatataaaatttaacttgtgttataacattttcattttgaaaaggtgttcatgtgacccacggcatttctagaactttatgacataaaacttattgctttacaattgtgtaggaagccgggcgcagtggctcatgcctgtaatctcagcactttgggaggccaaggcaggcagatgacgagggcaggagatcgagaccatcctggctaacactgtgaaaccccgtccctactaaaaaaaaaacaaaaaattagccgggcgtgttggcgggcgcctctactcccagctgctcgggaggctgaggcaggagaatggcgtgaacctgggaggcggagcttgcagtgaaccgagattgtgccacggcactccagcctgggcaacaaagcgagactctgtcttaaaaaaaaaaaaaaaaaaaaaaaaaaaaaaaaaactgtaggcaagcatgcctttacttagcaatcacaacttgctgtgactgtaacagcttttcatatattgaatactccacctttaaatcaaatcatttttattttcttcttgctgtatataatgttacacagacagacatgagacagcaactgtgaccaaaaaggtcattaataattaaatgggttcttagtccaggatttagtatttcctaaaccctgttgtctgatgtgttagttggctgaacttaaaatagtgaacaggaaaagtaaaactctttaaagtgtgaatatcaccgtcaacaagagaagagatgtttattcacattattgatcctcaattttaagacctgtttgtcactcagtaagttttagagaattagaccatgtatagtacttcaatgggtctgcaatgacactgacataatgtgttgttaagggtaggaacaaaatagaactcttcagtggaaaatcctatgtagccttttatttagtggaaagggatctgcaagaaagccgtgtgtctgtgtgtgtgtgtgtgtgtgtgtgtgtgtgtgtgtgcgtgtatgtttgttagacaaagctcccagaatagacttaaaatgaagcttgtctttttgtgaggcctttgacaaagagttaagcaccattccaaaaacctcactctgccttattcctgtccaattctgtatctttatagtctattagtgttcacattttataattattcagacccataggaacgtgctactttcttaacctttctaccatatcttagaaaccctaaataattcatggtctgtttttaccttaaagtgattttcacagtcatagacaagtcagtttaaagtaatgtgacacagagtaacaaaatgaacaaaaaagcattttgctaagctctttatacacactgccatgttgttctttatgacaaatttatgaggtaggttccttagccccatttcacaggctgagaacctgagactgtcaacactaagctgattttactgtgattacatcttagtgagtgacagatctagcaatcatggaattgagaaggccccacctatgttatgttataacataacataacataacataacataacatagcatagcatagcatagcatagcatagcatagcatagcatagcatagcatagcatggcaacataacataacacagggggccttctcaattatgttataacataacataggggaggccttataattttcttcattcttatcttgatgtgaaataaggacaacatctgcaacaggaggttgtgatcactgtaagaaacagcttcagaattacaaaatcttttcttctacaagttaatctgtactttcactcatttgcaaatatttcaaggcttcttcactcttgaatatcaataaagcgatgctcacattgatatattcaagtttctctatttcatttcttcattagaagctctttggttcacaaagtttattatctctaggaaatgctacagaggtgctctcctgtttttatatatgttatcactcacctcagttacatcatcgtgtattttctttctgcttcaagcttcttgaagtttcactgcatgcaaaatcacgttaaaagagaataatagccaatgttcacgttacatgtgtcgtctgtcaatggtcccattctttaaatattgatacatttctcaattctgttcagaatttgataaatctcttctccataacttgaacctgcattgctttgttcataatttcatgacactaactcttccgtatttttaaggaattgttaatgcacacaataatacctcactggtaagcagaaataataggttgtaccatggtatgatcagaatttgtctacgtatacctgcacacatacacacatacaccctccataaatattctcataaatcaatcttaatttaatgagaagtaacttgcatttcagcattgtgtgtgtgtgtttgtgtgtctgtatttgttttgagagagggttttgcgttgtcacgtaggctggggtgcagtgagataatagcccactgcagccttgaactcctggtctcaattatctcaccaagtagctgggactgcaggtgctcaccaccatgctcactaatatttttacttttatttttgtagagacatagtttcactacgtcacccaggctggtcgcaaactcctggcctcaagcaaacctcccgcctcagaccccacaaagtgctgggacaacaggcatgagccaccacacctggcaaatattttcaatatcacagaagcagtttttatgctcacagagtctcaactttaaaccataactccattttaaaagagaatatttgttttaaatttcagtagataaaaggtacagtaagtgattgcataaagaagaaagttataaaaggtgaattcaactctttacaatcttaaaaccagaataggtcttacagctttaacagcaaaattaagcattttctccatctttctctttaggtaaaaaagtgcattttggtaatgctgatcttcaagaaataatgtgtttctacttttctatgctatagagactaaggaaacacaaaaacgtattagaatcaaagtgtcaagtagaattgcgcatgctttggtcttgaatataaatttgtatttcctcccatcatagacacatttacaaagacaaaggaagtctttgtataacaggaaatctaactcctgtactcttaaaattttatgatttttgtcttcagatgttagagaaaaatacaaaaaacaattttgttggatgtggttttgtagccttacttagataggtagaactaaataacagattatttttatctgtaagtagcaatatctagtttgactttcctaatcttttttatttgtttttaattggcaaataaaaattatatatatttatattatacacaatgatgttttcatatttgtatgcattgagtaatggctaaatgaagctatttaacatatgcattaactcatctacctaatatttcaattaaaatatctccaagaagagaaaatgcacaaaataattaagcaaaactttcttgcatttaatgaaatgcaaaaattaatgaattgcacttaatgatgtgtgaaattaatgaataaaatgctagccagaagtagcccatcatcctgaaccaacagtagaccaatcagtcccatttcttgagctaatttcattttctcaagctgtgttactgctacacaaagcagtagatattggagatatcaataaatctgctattgtgtttttattaaaactcaaaacccacaagaatttatgctttaggaaataaaatctccaactcttagaaaacagattgatatgaacatttgctgtctgaacatcagaaagatggtatgccatttaaaattagctctaaacagtcttccaccctaggcttgcataattatcatgaattttaattttgttgttggtggtgatctaactgcatgaaaatcatcagagactaatacttgtcataccctttctcttgactttgtggcaaaagtctactgaccttgtcttaagagcagatgcaactaaattagtgcaatcctgccaacttagttttatggtatctcaaacgtgatggttcctcacactgtacagtctacattgctcactggcacagcattgtcataagtaaacttaactccagtggaattcaattacaatcttcttcacacatttatatttgatattgcaatacttaaaatactgttataaaatttataactgttagccactctctgagagctattgaagcaccaaacatattggacatctagaaaatctgattttcccattttttaataaattaacagatactatcatatgaccaaaatgagaaattattagctaaatacacaataatgtgtctcaactcataataagaacaattatcagacttgtaacttagttcatttatgagagattcctcaaaatcaacagataatatgtattttggggtaaataaggatttcggaatgcttttaaaagaaggaatctctttacttcaacaagaagcacaaccaagaatatttagcagactaaaaaactgtaaagctattaacacttccaaagaaagtggctaatatgaagaaaatcattgggcagttgcagggagttaacatggagaataagaaaataccttagttgattattatgtcaaataggcatctctcactgaagtcctagcttctacactaccttaaaactacacattttcaaaatttcaaagaagctgtggaaagtcagcaacagttccagaatataaaaattaatggaaaaatatctaaatacgagttacaaaacaaacctctaacaatttcaggatggccatgtgatcatgccagatgatctcaaagagaaatcttcaaacaatttacaggaatttatccatcacagccaggttacagtaatgacctgtgtaggtgatgagggataaaagactacacattggatacagtatacactgcttgggtgacaggtgcaccaaaatctcagaaatcagcactaaagaacttattcatgtaacaaaacactacgtgttccccaaagacctattaaaatagaaaataaatttttttggctggtcgtggtggctcatgcctgtaatcccagcactttgggaggccgaggtgggaggatcacctgaggtcaggagttcgagaccagcctgactaacatggagaaaccctgtctctactgaaaatacaaaattagccaaacgtgttggcgcaggcctgtaatcccagctactctggaggctgaggcaggagaatcatcgcttgtacccgagaggcggaggttgcaatgagccaagatcgcgccattgcactccagcctgggcaacaataaataaataaataaataaataaataaaaagacgaaaatctaacaaagttagtgaggaggtctcagaagcatgcctcatatgtcactagcataatcctgataaaattatcaaggcaaaatttgaacaagagcccaagggagcctcatggttttgaagacttctgagtggacttcataccactgcagcttgcaaaggttttaaatatggtgtggttaatatttacttattcatattttttgtaaaatttagcttggaaagtgactacaggagagatgacacatatttggaagttgtttctcttttgcaaattttacagtgaaggctcagtggattttctgattcagacctataaccaccctagtcacaaatattcatgcctcatacctgaccatgattacaaacgatgctaaaaaccacagaataatatattcggttggtgcaaaagtaattgcttttgccattacaaaaaaggcaaagtcacaattacttttgcaccagcctaatacaacagcctcacgggagcattctgcttaaaatcatttggtgacccaccaaagattgtattcgaattgagacacacatttttaaaaaatctggctccaggaatgaataaagctcattctacctagaagatactcatgggatagatgcaaattgttgtaataaagacaaagaattaagctgagatttgaacaacccatcataaaagctaatgcaaaacttggaatttaggcttagctggaagattgtttgcaagaccaaaaagctcaacattatctagaagactctgataagattcactgactatacaacataacactcatgctctccaggataaaatccaaaattactcaacattaaacaaacaagcaaaacaaacagaaaatatgaccaagtctcaaggaaaaacataattagatactacccttgagatgataaagttactgaaattatctagcaaagactttaaagttcttaaaaattatgaaactatgataactctgaggtaaaatcaaacacacttgatattaatattaagtatgaatctccaagaaatgtaatctttaaaaaacaaaataagaattttgaaactgaccactacaatatctgatctaaaatttcactgggtgagctcaataggagagtagatgtgacacaagcaagagttagtgaacctgaagatagatcaatagaaactgtgaaatataaagaacagaaaaaagtaacagagttcaggaacatgtgagaaaataccaaaaagttgactgaatatatcataggaatttagaaaaaggaggaggaagattagagaagaaaaaaatttgaaagaataacagtctaaatctttccaaatttgttgaaagacataaatttacaaattcaagttactcaggaaaacacaaaatgtataaactcaaacaacattatacctagagacatcataatgaaactaatgaaaccaaagtttaagaaagtatcttgaaaacagctagtgaaggatttcacagtatttacaatggaacaaattataattaccacaaatttattttcaaaaccatggaggccagagaataatggaacacctttaacatgcagacagaaatcaactgcatatcaaaaatatttatccagtgatacttcatagcaggaataaaaacaatgtaaaaataaagatattctgagattaatagagacaaaaatatatatcaatagtggaactttctctaaagtaaatgatgcaattgaatctgtaggttgaaagaaagtgatacaaaaagaacttatatcattaagaatgagagaacagcaataaaaaatgtcaaatatctgggatagcataaagagcattttttcctctaaagttctaaactttgtaagattttaaaagcaaaacttattatccggtgtggttttcaatgtacatagggaaaatacatatgataattatgccataaaatacaggattgagtatacagggattgagttggatttatattattagtgtatgtattttatctttaacgtgaagtggtaaaatagtaattctaataggctgtgaaaaattaggcatgtatattataatttctgttatactcacaaaaataaaataccaaatggcatagtcaaaagtcaattaaaaattaggattgaaataaatatacatatatatgtatgtgcgtgtgtctatatatacatatatgtctgtgtgtgcatgtgtggacatgtgtgcacacacatatgtatacaggaataccatggagatattgcggatttgattccagaccactgtattaaagtgaatatcacaataagtcacacaaatattttcgtttcctagtacatacaaaagttatgtttacactatactgtagttgattaagtgtgcaataatatgatgtttaaaaaacaaagcacataccttaatttaaaaatactattgcttcaaaatgtcaatagtcatctgagccttcagtgagtcataatctctttgctggtggagggccttgcctccatgtagatggctgttgactgatctgcatggtggttactgaaggttgggattggctatagcaatttctcaaaacaagaaaacaatgaaaatttctgcattgattgactctttctttaaagaaagatttctttatagcatgctatgttgtttgatagcatgttatccacagtagaatttctttcaaaataagagccatctatgacaaacccacagcaaacatcatgctgaaggggcaaaagttgggagcattcccctagaaaaccagcacaagacaagcatgtcctctttcactgctcctattcaatgtagtattgaaagtcctggtcagaacaatcagacaagagaaagaaataaagggcatccaaatagaaagagaggaagtcaagctattcctgtttgcagatgacatgattatatatctagaaaactccataatcttagcccaagttgatacacaacttcagccaagtctcaggatacaaaatcagtgtgctaaaatcacgagcattcctatacacaaacaagagtcaagctgagagccaaatcagaaatgcaatcccattcacaattgccacaaaaagaataaaatacctaggaatacagcaaaccagggaggtgaaatatctctacaaggagaactacaaaacactgctcaaataaattaaagattacacaaacaaatgaaaacacagtccatgctcatggatcagaagaatcaatatcattaaaatggccatacttcccaaagcaatttgcagatcaaatgctatttctatcaaactatgaatgtcattcttcacagaattaggaaaaaaacaaactatattgtaatgtatatggaactacaaaagatcccaaatagccaaggcaatcctaatcaaaaagaacaaagctgtaggcatcacactatctaacttcaaactatactacggggctacagtaacaaaaacagcatcgtactagtacaaaaacagacacctataccaacggaacaaaatagagatcacagaaataagacagcacacctacaactatccgatctttgacacagctggcaaaaacaagcaatgaggaaaggactccatgtataaataatggtgctgggataacaggttagtcttatgcagaaaatagaaactggaccctttccttacaccatgtacaaaaatcaatgcaagatgtattgaagacttaaaagtaaaacccaaaattataaaaactctggaagacaacctaggcaatacaatcttggatatagtaatgggcaaagatttcatgacagtctccaaaagcagttgcaacaaaagcaaaaattcccaatggaatgtaattaaactaaagagtttctgcacagcaaaagaagctatcaatagagtaaacagataacctagagaatgggagaaaattttagcaaacttcatctaacaaaagtctaatagccagcatctatcaggaacttaaacaaatgtataagaaaaacaaacaaccccattaaaatatgagcaaaggacatgaacacttttcaaaagaaaacatacgtgcagccaatgatcatatgaaagaaagctcaacatcactgatcattagagaagtgaaaatcaaaacgacaatgagatatcatctcacaccagccagaacggctactattaaagagtcaaaaaaataaaggatgctggcaaaattcatgagaaaaaggagtgcttatacactgttggtgggagtgtaaatcagttcaaccattgttgaaagtagcttggtgattccttaaaagctaaaaacagaactaccattcaacccagaattccattactgggtatatacccaaaataatataaatcgttggactataattatacatgcatgtgtatgttcataacagcactattcataacagcaaagacatgaaatcaacctaaatgcccatcaaaggcagattgggcaaagcaaatatggtagatacacaccatggaatgctatgcagccataaaaatgaaaaagatcatgtcctttccagaaacatggatgaagttggaggccattatccttagcaaactaatgcaggaacaaaaaaccaaatgctgcgtgttctcactgataagtgggagctaaatgatgagaacagcagacacatagaggggacaacagacactggggtctactggaaggtggagggtgagaggagggagaggatcaggaaaaataactaacaggcactaggcttaatacttgggtgacgaaataatctgtacgacaaacccgcatgacaagggtttacttatataataagccagcacatgtagccctgagcttaaaagttaaaaatattagagacaatcaatttacactgtatcaaattaaactaaattaaaattaaactttatcaacagagtttatgtcatattgtaagtactgcgttgtcaattcaacaatgttgtcacagcatcttcactgagagaaggttccatctcagtagaccactttctttgttcatccacaagaagcaactactcattgttcgggctttattatgagatggcagcaattcagtcactttttcaggcttcatttctgattctagttctcttgttctttccaccacatctgtagttcatttttccactgaagtattaaactcctgaaggccatccatgaagcctggaataaacttcttccaaactcctgttcatgtcggtattttgatcttctcccatgatcacaagtgttcttaacaacatccaaaatggtgaattctttacagaaggttttcaacgtacttttcccagatccatcagaggaaccactgcactacctaaggaagttttagccttatgaaatgtatttcttaaataataggacttgaaagtaaaacttactccttgaatacgggctgcagaatggatctcctgttagcaagtatgaaattattaatcttcttgtatatctccatcagagatcttgagtgaccagatatagtgagcagtgatattttgaaaggaattattttattttattttgagcagtaagtcttaacagtgggcttaaaatattcagtaagccattgtgtacccagatgtactgtcatccagggtttgtagttccatttataaaacacagaaaaagtagatttagcataattcttaagggtcttaagattttttcagtggtaaacgagcactggcttcaacttaaagtcagaagctgcaaagtcccctacaagaaagtcagcctgtcttttgaagccaggcattgacttttttttctagctatgatagttctagatggcaacttcttccaagagaaggctgtttcatctacacagaaaagctgtttttcagtgtagccatattcaccagtgactttagctagattttctgaataacttgctgctgcttctaaattagcacttgctgcttccccttgctcttgtatgttatagaaatggtttctttccctaaaccccatgaaccatcctctgctagcttcaaacttttcttctgcagcttccttacctctctcagccttcacagacttgaaaagggttaggaccttgctctagattaggttttagctaaagggaatgttgtggcaggtttcagaccattaaaactatccatatcagtaataaggctgttttgttttctagaaattcacatgttaacttgagtagtacatttaatttccttcaagaactttttttttgcattcacaattaggctaacttgtgcaagaaagctagctttcagcctagctccacttttgataagcattactcattacatttaattatttccaacttttgatttaaagtgagagatgtgtgctgcttcctttccttgaacagttaaaggtcattgtatggttattagttgacctaagtccaatgttgttgtttgtcagggaataaggggtccagggagagaaagaaagaagggggaatagtcgatcagtggagcaatcagaacacacacaacatttatatattaagtttactatcttataatagtgtggctggtggtgccccaaaataattatattagtaacagcagaaattgctaatcatagatcaccatgacaaatataataatgatgaaaatgtttgaaatattgtaaaaattaccaaaatgtgacacagagacatgaaatgaacacgttgattgaaatatggcaccaaaagacttgctcaatgcaaggttgccacaacctccaattggtaaaaaattctgtatctccggagcacaataaagtaaaatacaataaaatgaggtatgatgtaatatattttaattataaaaatacagaaaaggggaacagaagaacacatataaaacaataagaacaaaaaattacaaaggtgacaaacagaaagaaaaaatcaaatgatgcacttaaatctaaccatattagtaatagcattaagtattaatggcctatagattccaattaaaatgaagaaattgacagatttgatcttaaaaaagaatgattcaaatatattctgaccataataggtacattacaacagaaataagctgaaagtacaaaattaatatacgtataccatctgctcaagtgacaatataaaatttattaaataaaatgattttcaaaataaagagcattaatagaaaggaaaatatatacttcatgaaaatgaaaggaacaattgcttaaaaaacataaccattacaattgtggatatgtctagacccaaaatacaggaacaaaaattgacatgataaaagagaaaaacagccacttccacaccatacataagagattttaatgtctctctttcagcaattgattgaaaaattatatgaagagtaacacaaaggagcaaacaacattatctttcacttttctattccaaaaaagcaaaatacgtttttatcaagggcacattgtgtatttactaaggaaaacatatgctaagttataacaaaatctccataaatttaatggattgaaatcatacaaagtgttctttgaaaataaagcacataaactgtgcttatataagaaaatagataaattcagtaaacacactctccatgttaacaaattagatttacaaaatagaaaatcagatacaaagtaagtagaagtcaagaaaaaataaataagagcagaaatctctgaaattaaatagacaaaagagaacactagcaaaatcaaaaccagtatatatgaaagaagtttgccaaacctttagctcaaatgatcaagaaataaggaaagaaaaaacaaattgcaggtttcaggaataaaaaagggggttataacagaatctgtagacattaaaagatgagcatatgtattctaccaaattcaataaaagtataaaaataaaaaattcaaatatataatttatcatatttgacattaaatcttaataatggaaaatagattataatattattaaaaaggtttcaaaaactccactacctgcatgctcagattatttcagtgataaattctaatgaatgttacagaaaaacataataatcaatttaacacaaactttttccaaacacaagaaaatgagggagtacaactcaatctttttctttatggctaacattaccccaacattaagaacttacaaagatattgcaagaaggaaaaggaggggaaagcatagaggaggaggaggaggaagaagagagaggtagagaaagataaagagaattacaaatcaatatatctcaaagatggaataattattcagaaaatattatcaaattgaattactgaatctaacaatataggtagagtggatgatacagcaagaccaagtagtgtttattccaggactgaaaagttggtctaacatttgaaatagaagcaatgaaatttaccatattaacaagaaaaaagttaatgaatttcaacatacacagataaaaaaattgaaaaatatgttatactcattcaggaaaaaatgctcaataaactagaatagaaagggaatttcctcaacttattaaagggcatctattctcctaacattatacttcatggcagagacaactaattttccctttgagatcttgaataaaggcaagaattctcacttttactaacacttctgtttaattttaagatcataccatttataatagggccaatggcatacaaatctaacaaagagatgtataaaaactataatctcaatactgcaaaatattggaattaaatactacctcaataagcagacagttatacaatgcttataatatagaaaaactatgatccaaatactacaatattggaattaaatactacctcagtaagtagaaagttatacaatgcttatgagataaaatgttctatttttcttaagataacagatcttcccaaatttacctatagattcaatgctacaccaatcaaactctaacaagctttttggtgattattaacaaactgattataaattataaattaaatatgccaggtgcagtggctcatgcctgtaatctcaacactttgggaggccaaagcaggtagatcacctgaggtcaggagttagagactagtctggccaacatggcaaaaccccatctctactgaaaatacaaaatttagctgggcgtggtgatgggcgcctgtaatcctagctgctcggaggctgaggaagaagaatagcttgaacatgggaggcagaagttgcagtgaggtgagattgtgccactgcactccagcttaggcaacaagagagaaactctgtctcaaataaattaattgattaattaattgtattaataattattaataattatattaataattattttattataaagaggacctagactaatcaaatcattttttcaagtttggagaacttgttctaactattatcaatatttactataaatttacaactaatcaagttggtttggcattggctaaatataaacatgtagatcagtagaacagaacaaaaattccacatctctggtcacatacatggtcaattgatttaaaacaaaggttccaaagcaatcaaacagggaaacataaaatcaacaaaggatactggatcagctggatatccataagaaaagatgccagcatcatgttttagctcacaccacagagaaacattgattcaaaatggatcattgacctaaataaaaactaaaactataaaatttttagaggcagttggagaaaatctttctaccttggggtaggttgagatttcttagaatataaaatgcacaaaccataatacaaaacagaatggtaaaatggacttcatcaaaattaaagttttacttttttccttttctttttgttatttgtgtaaatttagggggtaaaagtgcaattttgatacatggacatgtaatatttcatagtgatgaagtttagactttcattgtatgcatcagctgactcctttatttaaaaaaaggcaagacattgagaaaaaatagtgagaattttcatatcagacaggtgttctgtatccagactattttaaaaatacaatttactgatagatggataacaacaacaaaaactaaatacgacataattttaaaaaagacaaatgatttgtaaatatttcaccaaagtagacatgtaaaaagcaaataaccacattaaaatatgtttagcatcatgagtctttagaaaaatgcaaataaaatccacaatgtggtagccctaaaatatccattagaatggctagtattaaaaaaataatttgggaggccgaggcaggtggatcacctgaggtcaggagttcgagaccagcctggccaatatggtgacaccccgtctctactgtaaatacaaaaattagccaggcatggtgatgtgcacctgtagtcccagctactcggggtgctgaggcaaaagaatcgcttgaacccaggaggcggaggttgcagtgagctgagattgcaccactgcactccagcctgggcaacagatggagactccatctaaaaaataaattaattaattagataaaataaaataaacatcccaagtgttgccaagtctgtgcagcaacctaaattctcatgcacttctggtaggaatatgaaatgtatacctacttctaagaaaaaacttgacactttttaaaataataatcattcacctatatgaacgtgccactccacttctattattcatcctccaaaaatattaaaacatatatattcacacaaagccttgtacacaaaggtttataacagcttcatataatagttcccaaatggaaacagctgaaatgcaacaagtgaatgggtaaattgtggtatattcatacaatgaataatcactcagcaataaaatagaaggaactttgatatatgaatcaatatggataatccttactcttatcgaaatccttactctgagtcaaaaaatccaggcaagaatgcatacacagtatatcccatttatataagttttttaaaatgcaaaatacttggatgaaaggtggtcagtaactaagttgttgcctgaagatgggcatagagggagccttggattaagcaagacagtaggacactttgggtggtaatgaaaatgtcggttttcttgattataatgatggcttcaagcacagatacagatattaaaaccggtaaatttttcaaatatgtgcagtttattttaattaaattattcatcaatagagtttaagacacaaacaactggattccaccagaaaactaaatatattaccttgttaaattgatgcctaagtgaagcatagtgcctcatagcagaaagggttaaatttatttcattaatcctctgttttgaaaaagtgatcactagataagtttgttcaaaaagagacaaaaataataacaaaaacaactaggctttgactgaaaatccagtgccttaaaaactgtagagaatttctacactgtttctttcttttgtccttaaagtttataccacaatatacaagaagctaagaaagttggacaaatgtaacaagttacggttcagggaatgacagggaagataccaatatccccaaatccataaaagtccttgattgagaagttcatggaagttgacagggggtttaaaaccatgaagcctcaaatacaaggttgtcctcactagatcaaatgtgtctcatctaaggagaaaattattgtacttacatcattagaggcatttatggaatgtttaatattacatgatccaagaaacaaacaaggacatcagaaaatttaggaagtttggtgaatgcctgcatatgaggttttgtgatcttctgggattaagggtggagaatcttctcttagtttaatgtgggcactttgacctgagtactggactaaaaattctgatcacagtcattctctaaatattagtctgtgtcaaagagttcaaatgtgtgacttccagactcttaaatgttatttcaccatctgtgtcctttcaagcgattcaacaaagaattaagcaacagaaagaatgagaaaacaggccactaacagagagaatgtaacaccaccaatggcacattaatacacagcttcaacagctcaactcactaccccctatggcccggtttattatacaaggagaggattgaggagagagaccacctgaatctgcataacttagctatttgcactaagatatttttgtctaggaagtcaagataacagaagaataaataatttcacattgctttagaaaatccttggaaccaatttttctgagtaaaaggttttctcatttgggcatgttgccttgtctgggcaaaagtttacttacctaaacaaagagtttccctacaagaaaaatcatttgctaattaaagctggctttcattatgcattgagtttctccctactttgttaaatatagtatttttaaaagaaaagctaaatcatccaaagtgatacatatatagcaatgtgtaagctatatatgttgtccaaagaatgtcattcaaacctgtttcctcccttgtaccttcatttccaccagataaaaacccagcatgctaaaaggttttttttttttttattaatctcaggtaatagaagatacatagagtccatttaatttttaaaacacagacccaaaaaatgagaatgtttacccaatgtgcttattttactttagtccgtgatcaaaggtgagatttctcattcacttcactcccagaaacatgatgctgtcacttgcattcaatgaagagaatatggtctttcttccccctttcttgctcaccacttcccttactcactgtttcatactctgccagagtttaaagacggttgtaggggtgtctattagcccattttaacattcctataaagaaatacttgagactgggtaatttataaagaaaagaggtttaactggctttacaggaagcattgtgctggcatctgctagatttctggatagacctcaggaaacttacagtcaaggtggaagacaaatgggaagcaggcatgtcacatgaagaaaggaagagcaagtgacagagagtagggttggaggaggtgctgtacacttttaaatgaccagattctgtgtgaactcagagagcttacttatcgccaaggggacagcccaagccattcatgagggatctgcgcccatgatccgaacatctcccaccaggccccacctccaacattgggcattacaagtcagcatgagatttgggtagggacaagcattcaaactacatcacggtgggaggagaaaagcatatggccaagttcttatttctcctccactctctctagtgaacattttcatagatacttcagaggctactcttgaagtagtgcctcttcttcatctacttcttcctgatatctcatcagtggttgatcttaaaatctcattcacatagactctgctttatagtcctgccatgctaccctagtggatattctgaagcaagattcctatcaaaatgaccttggtcgtaaatagctggattgagttccagaactcacccctaggttttatgtttctgttagtatttacagttgttagaaggaaatacagttatttatcaagtcagcaacaacatttctcatccccaaccctattctttttcttctctcttctctatccaccatcctgccaaagacattttgcataacaaaatcagtcatggttaagcacatgactgcatgaaacctttttccaactccccaagggacctcctggaaagccccctcatcaggcttgagattagaatttaccttcatccttcatttattgattaacagttgatttgggatttgcaggaaaatcagagtatgaaaataatttttcccagagatatatcttcagggcccaaagtttaaatccccttcttgatctttttgtgtcctgatgcaagtgaggattttcaaaagttttagaaaaaacaaaaatacttaactgtttccttggaaatttacattttggcctgttacccaactcacttttgaatctgttatttatttcacctcagacatcaataagacattttccaaattaacatccagtcacaaatatttcaaaattttacatcagagatgggatgataggaaggggaaagaacttagtgtcatttgttaaaaatattaataagtagaaaatatttttgtacttaataacatatctattggaataaaatagatttctgaaaggaaacaacaatcgtttattactgcattgtagaaatatagaaagactttatatttttaaaatagattttttatttttaattaatttatagtaattacacagtagtacatgcttaatcagaatgaaaaattcatgggttttttttttaacagaaaataaactttaaagtaagaagagaaaaattctgaataaacaattccagcctcttcctttgtttattccattttctgctgggttatcacctcaattctcacaaatcccgccaaccaaagcttgtggtgtatgcatgtgtcatgagagaaattgctacagtattaatactgagtcttttttgaagtatattgacccacatctaagttagaaagctgtattttggtgtcacactctgtattctttggtcctaatgctaaagttttaatgctgtcagatgttagcagccagtttttttcttttttctttttcgttttaacctcattttcactctcttaaagtcaaaatatgcctaactaactacatttgctaagattggcattttaaaatgccatcaaatggtcacagtgtaaaggatctttcacagttgaagaaaacccacacacagggtagatttgtttttgacccattagtaagcttagatatctcacaaaacacaggatcacttcaaggcagcacgcctctagttaagatgcatttgcagtgacagggaaatgccaggtttctgatacagatttttttatatataattattacagatattttatatatatatatatataattatatatgtacatatatataattttgtagacagacatcttcagagataattcttttataaaatgaaatagcagtattttagtattatattgatatatgtctatgattgaaaaccacgttgaaatattgaatgatcaggcacctgctaatttctcatcagaactctttgagaaagtagtgggaataagtataatttagatgatgcaacattgagtaatcagtatgagaacagcttgtaaactgatgacattggcttgaatttggctgataaaaaattagaaaaataactatacttttcctattgtaccattttttcctctcaagcagaataatatttcttctgcacctggaaccagacttctgaactcatttcaagtgactgaaccattattgagatattaaaacaggtgttactaaacctaccagttattaggttttcttcatatatctataatttttaatgtacaaatatttacttatttgtgtgttatgcccctttactagattatcatttctggaatattcaaatctgtatcacattcactttttccacaatactttgtattcaatacttattttcaaaacgtcatttgtgttgttaattacacgtaaattccttggttctcaagtgacttattttcagcaggtgtagagagagataatcctgtataaactagcattctgtatgcagctttggattcattgtgcactttgaaaaatcaagatcttgagagcaatgcttaaatttactggggaaatttatttttgagaacaattgaaatttggttattttttacacacagatttcatgactataaataaaaagatttttgactgtgtaaataaagttgatgttgacaatttattttttaataacaatatgtgaatatgtaattatctaaacccgaagttagcaattttattttataaatggccaggaagttaatacttggctttgtgaccatactctctcttgcatctatgcaactctgtctgccattttagcattaaagaatccatggacaataggtaaatgagtatgttgattttcagtaaaactttacttcaacaacatgcagatagcttgacttgatcatgggctatagttgcttactcttaatcaaacacatgattatataaaaagacaagttatattattcagtgagtttctgatactaatttttataatttttatcacattcttaaattggtgaaaaccctttgttgaaaccaaagactgttttctggtctgttttgaattcctctttgttgtctattctaatgttttcatactcgtttttatgattatgtaagtttccacattgggatgtgcttgtcctttgcatcttttaaaaattcttgaacatatgtttgagcttcaatttctcaagtacatcaattaaatattggtagcatatctagggagatgtcatcctcacattattctctacagtgttctttcgaatgacttactttgctggaaagtctattatctatggtcatgtgagtttatttttctctctaagtactactttatctgtttgaatcctttttctatgaagttgatacagttagttgacaatgtaaaagcaaggaaagaagtgagtggtaaagaagaaaggacaaagaaagaaaaagtgaaaagaaatgagagaaggaaggtcaaagcaatgtgattttgtttttttggaagaaagattggcttcttaaatgaaagcaggtatgaaaatactcactatatttgacattattgttttgatcagacgtcacataaaatccaaaatatgcccaagattaacacattaaatagtcgcccgctgtgcttaattatgttattgtccccagttattgactgccttccctataaggaaattacacctttttgctaaatcctatatgccctgcatggactcttgatggcataacttttctccttctctttgacatcatattggaccttgtgatttgctatggccaaagaaaggtgagcgctccaaaagaaatggtaaaatcctttttctagctctggcattgctttatccactctatcacaaataacagcatgacatagtttggagctcttccttcagtttagattcctgaataaagaagctaaatggagcacaattagcagtgcagttccaaagccaaactgcagttggaatgtcgcatgggtgagaaagaaatcactggttgtgagccaatgagattttgatgttgttactacagaataacttagtaagagtttaaaaatacaaaaaatatataaggactgggtgctaaagtaattaaaatctaatataagtgatattggcttcaggaaaaggcagcagatagcaagaaaattgttactagaaattggacattgagaatcaacttgttcataagcacaagcatctaataatctgttgtgataacttgaacgtcatacattataccaattgagcttctggattattaaagaagtttacgaatacactgctgcaaacgtgtcttagtgtctataggttagatttactaagaacctaaaagaaagagttgagtttcaaaaagatttggctgccgtacaagcaaaaataaaagagaaaagagatattctataaatttcaaaatttttaatgatatgatataatttttttatctacaaccaaataaacttaaatagagaaatgcaaaacaaagacaaataactaccaagtcttaaaggttagacataaaatcagacactttatagttagaaaaaaatggctcgagggaaattccaagagttcgctaatggctgttaacctcaagctataaacaatgaagactagagaataatgtgccatatgttgaaaataagtgtaagtataatatttagtgaatagagccaactgacatcaaattgattaaaaagatgattatattttttgaaaaatcactgccaaagggcaagcagttgagacctaagcagcttgcatggttgatagaaggtgagcaaaagagacctatgctatgcctgagcagtagggtaaaaagtaattgcaggcataccccattctattgcacttaaatttattgtgcttcatagagaatgcatttttttaacaaattgaggatttgtgacaattatgcatcttttggcactattttcccaaaagtatgtgctcattttgtgtctctgtgtcagcaattttgttgtagcaataatctattttaaaattaaggtatgtacatgtttgtttgtagtgctattgtacacatagactactgtatagcaaagagaaccgttacataaactaagaatccaacacatttgtgtgactgaatttattgtgatatttgctttattgcagtggtctggaactgagcccacaatatctttcagatatgcctttgtgtgattctcttgttgctctttgcttttgccaatgataaaggcatgttttgaatgtgggctgcttttcaaacatgaattttatcttgaagaagacacatggaacattacaacttatgtgtctcagccacgatagataaaatgtaatgtttcacatatttagtactgactgaaaaatacatatttattattataagtccactgatatagaggggatgcatgttagtgaagcataactttgcaaactcaaactacaaaagcaccaattgaataagaataataatatgtagaaaatagttttcgtgagccaggaattattattggcatattttatgcattgtttcatacaatccttataaaatatcttaaattatggagtcctccatcaaggaaaaatttaaaatgggaggaaataagcagatatgaacaattagaaataaaaatgctattgtatttcttcagagaaatgcaaaaggtacataggtaatagatcaatttgttcagaattctgaagaaaattagatttagaaattttgagtacctattctgaatacaagagagacttaaggcatcccattcattctttgctggtacatactaagcttagagagacaacttcatttttaataacaaaacagaaacagagtggggggactataaaaaatgcacaatatgaagagaaattaatacactagagattcaaaggaagaatctgtatagttcataactttcaatagaaaaagtatgaccattctaacaaaccactaagctagtattattaaatctaggtgagagattgatccctcgaaaagaacaaaaaaaacaacaacaaatattgtgccataagaaatgtgtagaatcaaattttaaatacacatatgttctatttactatatatgtaaaataaggaaattgactgagtttaggaaagctgcaagagatcacacaatgtgaagtaagaattgctagaggaagactaataaataaaagaatgacaaagaaaataaagagaagtaaaaaattacatatatacagtttttattaaatcaacaaattttaaaaaatacatgttagccataggttgaaagaagtatttttaaaatattcactgtttcctagggagaaaaatgacttaggaaattgcaaagtaagaaccaaaagatttagctgaaaaaattatatggtaggtagcaaatatgaggcaggggcagagtctgcacctgctcactcatgtgcccctcaatactctgtgcctggctcacccttgtcacatgtgggatccaagccagtagcatgagccgagtgggcagaacaggctcagcaggcctaaataaaacttgggcaaaggtgccatctgccacaaaaatttccagctggcaaagagacaccccaagaatcctgtgacattactcctgcaaaaatggccataataaaaaaatcaaaagataatagatattggtatgaatgtagtgagaggggcacacttttacatggctgatgggaatgtaaatgagtacaaacactgtggaaaacagtatggaatattccttaaagaactaaaagtagaactaccatttgatccaacagtatcactactgagtatctaccaagaggaaaagaagacattatacaaaagatacttgcacgcatatgtttatagcagcacaatttacaattgcaaaaatatagaaccagcccaaatgcccatcaatcaatgagtggggagatacacacacacacacacacacacacacacacacatatatatatacacatacacatacacacacacacactatggaatactactcagccataaaaaggaataaaataatggcatttgcagcaacctagatgggattggagaccattattctaagtgatgtaactcaggaatgcaaaaccaaatatcgtatgttctcactcataagtgggagctacgttatgaggatgcaaagacataaaaatgacacaatggactgtggggactcgggaaaaggatgggggtgttgagtgataagagactacacattggatacagtgtacagtgctggagagatgggtgtaccaaaatttcagaaatcactgctaaagaacttaattatgtaaccaaataccacctgtttcccaaaaagctattgaaataaacaaaataaaaaagataaagtttaagcaatatttatattgtaaagaataaatttggttaaaatatttgtttgattaaaaacttcttagccagatattattaactagacaaactgaaataactgaattatttgtcaaataatattttataagtataattaactaaacgttaatttagcagcataaaaagtaattaatacaaaaccatgaacgaataaattttaaaacaagggataattaaaagcatatatatgtgtgtgtgtgtgtgtgtgtgtgtgtgtgtgtgtgtgtgtgtgtgtgtgtgtgtgtgttaaggaacggatctctaaaaaatcaattggagtcaacatctgggttatatgcctaagcaaaggacaaataatatagaatgatacaagaaataagactataaattaccaatgtgtaaaagaatttagatgttttataataaaatatttgctaaaatatttccttgaaaaagtataaatttcaaaaaagcaattttaggtatatattattagaactacctcaattggcatttaaaagctaaagaataattaccaaagttgaaatgaacacatttatgaaggaatgtcttctataaatgctaggccaacatgctacttaaaagaatttagtagcatattaacataagtagttttcaaattggtcaaaaacagttgggttgcttgttttagtttccccagaagcacacattcgaatatgggtttggctgcaaattgtttgataggtaatcttaagaagcactggtatgtaaaagggaaagttagacagggaaagaaaggatgacattgatgttgtctaatgatacggttaccactgatggggacttctaggagacagcatagaatgtgttttcaaattgtttctcttgtacatgtgaagttggaatatttatctgttaagttgtatcattggtttaagaccattctcgagcatacatactcttcacatgcatgtggacagagttcgcatgttttctgctgatctgagccttctggccaaggaacatccttaggaagagtgtggccagtgcttgtagcagaaaccattggcctttcagagaatagtaagtgccaggaaggtgtggagtgagcactaacaacttctataggcaataaaataagaatgccataacatagaaaacaagtagcacgcacatacacacacacagagtaaagctctctcaactacagacaaaattcattcatgagtgctattataaaagcctttagcaaattaagaggaaaacgtgacatagcaaaatggaatttgtcagcaaggaatcactattatatttcacattttattagctaaattaagaaaagtgaagcatatgcctatctcaatatttgccataaagtaataaactttaacatgcaggaatgccaatgatatgattacagttttgccattagaagtagtcttaggaacatgaaaaagatttctacaaacacaagtaattcatagcatcgcagtggagatgactggttaatgactagaataaccctcttaatgccgtgagtgtcattaactccccacacttgaaaaaccccaagaaggaccataattttgaattttcttacagtggttgaattatgagaaataaaattatgagaaagaaaagatgactaacctttaggttcctggggaaacaaattaatccattaattgaatcaattattaatgacacactcagcaaacatagccattacagtcaaaggtaatcatgggtccttacctggggtctagtagagcttacagtttttttttttcttaacaaaaatatctgtacatgtttcatgtacacaatttagtgcatatgcctgtagccataaaatcaccacaataaggataataaatatactcatcattcctaaaagtttccatgtatttctttggggaggcggtgtgtgtgctgatgtgtttcaaatgtgtatgtgtttgtgtgtggttagaacacttaacatgagctctaccttctttgtaaattttaagtatacaatagtgaattgttaactataggcacaatgttgtttagcagatttctagaacttactcatcttgcataactaaaactttatatccattgtgtaacaattcctatctttccttcctcctagcccttgacatccactattctattctctgcctctagaagtctgactatttttagaactcatataaatgaaatcatgcagtatttgtacttctgtgactggcttatttcacttagtagatgtcctccaggtctatgttttcccaagttgtaggattttcttctttattttaaaaaactggataatatttcatggtacatgtacattatgttttctctgtccactcatctgtctattgaaatttgggtcatatctgtagcttggttactgtgaataatactgcaactttcattagtgcaatatctctttgatatcatgatttcacttattttggatgtatatccgggagtgagattgctgaattgtatggtagttcaatcattgaattcaatacattttagggataccaaatcaacatataaaaatcaactgtgtttctatacattaacaatgaactgtccaaaaggaaattaagaaaataataccacatctcttccacaacaatgtgaatacacttaacactactgtactgtatacataaaatcagttaaagtggtaaatgttatgttaactgcaatttaaaaaattaaactagaattccggttcagaatttttttaaaaaataaaacaatcccatatataaaagcatcaaaaaaaatacctagtaataagcctaaccaagaaggtgaaagacttgtacactgaaatctataaaacaatgatgaaataaagcacacaaactcattttcatggattggatgactcattattattaaaatgtccgtacgatctaaagtgatctactgatttcataatatcttcatcaaaactccagtgggattttttgcagaaatagaaaaaaaatctaaaatttatacagaataacaagagtttgaatagccaaagtgatcttgaaaaagaatacagctggaggcatcagctctctgatttcaaaaatatattacaaagctacagtaattaaaacagtatctgtttccaaggatgattaggaaggaacatgtgagaatgatggaattacctccaccagattctcttcactgtgcttctttcggaatatgaaattgaattgatactatcagccatttaaattgtgatttaagtgtttttatttcattataatacgtgataaacatatcagtaatttcagagtctcatgctttatttcatgtattagctttaatttgggtaattattaatttgatcatataagtaaaatcattcttcctgctttactatttcctgaaatatataccttcgagattaaaaaagtgaaaaattattcagataaataatttattgtgaacagttttgcaacaccatgtattttagtgttcctctcttcagcaagttgcattcatacaatgataataacaacaacatcatactagatttttttcactaccaatggagtatttagaatatttatttctagtgaaagggttgtccaacaactactttcacaaaaacaaaagtttcagttgcttaaatgttaattttctattgacacataatacgtgtatgccggtatgggatatgtataatatttgttacgtgcatagaatgtgtaatgatcaagtcagggtatttaaggtattcagcagcttgagtatttgtcatttccttgtgttgggaacatttcaacttctctattttagctattttgaaataaacaatacattattgttaacaacaatgttattgatcattagaacttattcttcttatctaactgtatttttgtagctatttactaaactctcttcatctctcccacatgtattcttacacccttctcagactctggtaactattatgctacttcatgaaaataactttttaagcccccacatacgagtgaaaagatgtgatatttgtctttctgtgcctggcttatttctcttaacataatgacctctagttttatccccgttgctaaacatgacaagattttagcctttttatggctgactagtattctattatgtatatatgccacatcttctttatccatcccatccattgatggacacttaggttaattccatatcttttctattgtgaatagtgctgcgataaacatatcagcgcaggtatctctttgatatagtgatagcctttcctttggataaatacccagtagtgggaatgctggttcatatggtagttctgtatttagctttatgaaaaatctccatactgttttaatgcttaaaatactagaacatggaataaagttatttttgcaagtgcattttaaaacaattagagctacgcactgaagaaaaacattttctgctaaagtagtatgtgcctcactgaaaagtattcttgtttaatagaagtattatatcttataataaatccaaactataataaaattcaattaagcacatgctattttcaattcagtaaggtaggcaatgtgggaatttagattcaaatgtgtatggtttctcttctggaatctagaatcaatattgtaaaaggcttgtaaaaaaaatgactatactttgaaaagaattaagaagatgtataaatggaatcctgagacaagagagaaacagggaaaattaattctacagagtaatttaggaaagtagcagatgtgggaatcatcaaatgatctgtacaaaaaagaatttgaggtaagtagcactgttagagttaggtcactgacagactgagaagtacgtaagttcttaggaagcaaggttgaaggcaatttaacaataatgaaaagtgcaggccataaatatggaatagcaagatatcagggctacatcaccaaatatttactatacacctattatgtaccaagctgttttcttagcactgaggattaaactatcacttggagacgttaaagtcctttttcgtatgaagctcattatctgtttgaggtgagagtaggggatgacaaaatattaaatttaaaaagtaaaaaataatgaataaataataatcactaatttgagagcaaaatagggtgtatgatagaaactgactgggtggctacttttgattggttttgcaggcaagagctccctgtgcttatgtgacacatatgattcgttaagtgtttactttatgccttacaccgtgttcattatatcaactaacaactctccatttctcaactttgcacataaattattgtatattttctgcatacatatgcaaacacacacacacatatacagatgcattaacagaagatacaatatcatgaaaattacaaaaagaaaattgaaggcagaagatctaagtgaattcttaaattctaagttattcttaacctctaagttattgactttctgacctgttattcattacattcatggtgtgataatagcagccaactcacaagagatccatgagaaaaaaatgaaatcctataagtggatatacagtagtttgaaaactacatattagaagtggcaatgtacaaatatgtttatcaccatcttcatataattatttgtatacatgtctaaatagcataataatgggaataataccaacagaaagtcccagtaacttgaactgatattatatgtagccatactactgcagtcaaaggtagatattgaaatataggaagtgattctatagtaaattattaaacgaatgggaaaattctttctgcatggaagttttttcacattatagttaaaaataaagtgatttatagtaataattaaattaatatatagtaataaataatagaatatatacatactaatgattagttagttttagtacctataggtagtctaacagagtataaagttacttattatattacctttgaactggaagctcatggggctctttgttttgtttttcttttcttttcttttttttttttttttgaggcggagttactgctgttgcccaggctggagtgcaacggcacaatcttggctcactgagacctgcacctcctgggttcaagcaattctcctgcctcagcctcctgagtagctgggattacagaggcgtgctaccacagccagaaaaattttgtgtttttaatagaggcagggtttcgccatgttggccaagctgttctcaaactcttgacctcacatcatccacccaccttggctaggtaatcccaaagtgctagtattacaggcgtgagccaccacgcccagtcggtctctttttatttctgacagtttcatgtagataaataaaacatatattaagacacaattagagaataaacaagaaattattatgttattagggatgtcattctgagaagaaattacattttcaaaaaaattatttgaagcaaatagtaagaggttcacataaattatataaacaaaaacattaaaggattagaggaaagaattgagttgttgtgtgaaatttaatttctgtatgcaagaccactttcagcttgaaagactttagtaggcctattaccttataagccctgtgcttcactgttccacatggatctcacagtgagaacttacactcagctgagagatctagcagaaaattgtactcattatgcaatagaagaagagaaaaaatagggcaaaaattatttctgaagtttaaatggatgacatgatcatcagattcatgaagaaagacagcagagtcacataatatacatggaatgtatgagagaaaaaataaaatatattgaccaaaaccagaaggtttaacacaacaccaagaggagttaaaaacttaagaagaaaaaaaaaatggagcaagagttataatcaataaaataatctatagattgcaatttctgtcattatgctataaaacctattcataaatgggactatttctaacctcatccattgccactgacatttcttctctggactatcatattaactttctaattgtcctttatctattgcaaacattttgtcccttctccagatagttacaagattatagccagtgattttgtgaaacatagtattatccagatcttatgtagttcccttgtcaagaataccagtggcctctgaactcagtcagggtaaaaccaaactcctttcaatgttctacagtgtcctgcaattttcacccctgttaactctgaccccatctcttaccgattttcctcagctcatataggattctttctttagagtcttttcactgctattttttaaacaaatattttcaaatgttaaatgaatcattactttaccctttttagctcttaacacacataacaccttctcgatgaggtctttctgggtgactgcattttttttaagagacaggatttcctctgctgctcggtggtgccatcatagctcactgcaacctgcaactcctgggttcaactgttcttcccacctcagcctcctgagtagcttggactataggcatgggccaccatgcctggctaattttatttttatttgtatttatttatttagagatggcgtcttgtaatattaatcaggctgccctgaaactcctggcatcaagcatcctaccacctttgcctcccaaagtgctaggattacagccatgagctactgtgccaggctggtcattgcattttaattgaaaccaaccgtgtcactaaatatctgctccactttctctctggcaatcattgctatctaaactttataaattgttttttatttatcttttcttttcttttctctgttattagaatgttagctccaaaataacaagaaattttgtcttatttttaaaaatttttattgctacgttcccaacagcctaacagtttatgggatatagcagatgcctaataatgaatgaagacatacttaataattaattcaaggatgatgcttacgtgagtaaatcaaatttagaataggataaatgaaatcttccacaattagagatatctgtataacatttcagaacaaaacaaaaagtattattgtggaaagaatagttaatatctttggtttttcacatacctgtgatccttacaggggaaaaccttcatgttttggccatatttcctcaggctagttgccagcaacaacccttatttagcaataagaagaccgtttgcttcatgtgttgtcactagtatcttcttaacaggaaagttaatcaagtctggaaatatgttctatgagttccatgatgccccttcatgtagatttcccctatatattgccctccaaacaccccccatcctcttcttctgtgccatcatcatttcatcttctagcaggttgtttgagaagactgctattctggtcaagtgaatgaactactaatcagcattgactctattcctttattttcttgaagggaaccaatacattaatgttaactattacattttgactgatgagttcatggagatgaatctgacttatggtacgtttgaaaaataagcattgtatcttacttaacatagtgtattagtcagggctctctaaggggacagaactaataagatatacgcatatatgaaggggagtttattaggagaattgactcacataatcacatagtgaagtcccacaataggccatctgcaagctgaggagcaaggaagccaattcaactcccaaaacctctaaagtagggaatctgacagtgcaccttcagtctgtgtctgaaggctcaagagcccctggtaaatcactggtgtaagcccaagagtccaaaagctgaagaacttggagtctaatgttcaaatacaggcagtatccagcatgggaggaaagatggaagccagaaaactcagtaagtctgctttccaccttctcctccctgctttattctagctgtgctggcggctgattagatggtacccacccagattgagagtcgatctgcctctcccaggcaacaccctcacagacacacccaggaacaatactttgcatccttcaattcaatcaagttgacactaaatattaaccatcacacatggctaatataattttccaatgacagaaaatagtcaatacttctagaaaaataaaactaggctccaacatactttatttataaattatttatttatttataacaaccatcagtttatataatcccaatgaaacttagagaaaattttagtcagatattttaatcattattatatatttattaaaagccatatataaatgtaaaatctttataaaagaggtatgtttgtggcagtaaacataattattattcttttatatgcaaacaatataaatatgagtaacattgcactataaatttttttttaaggtttgaagtgtaagcaaaactttttctctccagtatacagaataattcacctgctagcattattcttaatacagctgatggcccatctcattttattattttttgagattgaagtataaataagtaaaatcctcaaataaatgtattttattatgatttgaatgcatgaataacatatattatcacatcattttctacatttattcttatatttaacattatactatagggtacatccttttacttagtttgtaaaatcaagagaattgaaacaactttgaaatgtgtttttatcaattaaaaataatgtgatatcattgaaatcagaagacaaaatttagttaagtatttgagtttcagaaaatggtttatttcattgatacttgcaatagatatgtaaatatttccgtatcaaaagtgcatatatttgaaaatagaaataatttccaatacatgcatttttgataggaaagtacaatatctaaaatacttggtaataagaaagacaaattataccaaccactagaactaatcatcaaatatgttcaagtgtcctttctcatcctcttaaagatgaatatggccatgtcattgttttggccaaaagaatattaataaaaatgataaatgtcccttacttacatataaatttgaaaagccagtttagagtttaccattttgtttttctcccaaacacaaggatcgacagcactccatatggtgcctgctccagtatcctgggtcctgaggacaaggcagagttacagatctctcaagtaactcacaatgcacatggaaaacaaacttcactgttttaagccaccgaaactcagagtttgtatattacaacaaaataacttagacatttatttggttagtacgtgttagcatgagaatgggacctagaaatttgaacactagagtttttgtcttaacaaccatattctattattttccatattaaagattgcatgcaaatctattgatttattattgtatcgtgacaccagatatcttttaaacatgtgtttaggataagaaataatagaaactttgaataaaattatttcttatcccaaacacattctctatatgggagtgaagaatgtttcttggttgggctgtgaatcaactccccagttatggttctcatggcccttgtctcttctctagtctcctagatcttcatacttctttttaaacctcctggactcatttgaggtaaacattgcttgctttcttcatgattaaataataattctttcataattaagcagttttctcagtctgattcctgcctatatgtgactactgaatgctgttaactaaaaaatctctgagacatagttcaatcagttcagaggttcattttgactaggctaagagagtgcccaggaaaaagagacgtaagctacagtagaatctgttgcctgtactttttccaaagagggctttgaggactcaatatttaaagaagacagagtggcagaaggggaaggagtaaagaaaaaaaaaaaaagaggataggtaggttgtgagataagtggtcacattgttgtgaggctttgattagtgctcactgaatccacatgttacatctaaaaggaggggaaagaggaacatttgattatgtattttttaaaatatacactttacatattacaaaaataaacataaattactgagccataaaaaggaatgaattaatggcattcacagcaacctggaaggagttggaaactattattctaagtgaagtaattcaggaaaggaaaatcaaacatagtatgttctcactcataagtgggagctaagctgtgaggatgcaaaggcataagaatgatacattgggctttggggactcaggggaaagggtgggtgtggggtgagggataaaatactacaaattgggttcaatgtatactgctccggtgatgggtgcaccaaaaatctcacaaatcatcgctaaagaacttactcatgtaaccaaataccacctgttcctcaaaaacctatggaaaaaaattaaaaataaataaataagcacagagaaaacagtcaaatatgcatttgtttctgagtggttggggggatggtttctagtcttgtttatgtcttgtacctgtaaagataagcagttaatttacattgtcagagtgaaattcaacagaactctgtgttagtgcaaagattttggggctcacaaggaattttcttgcgagtaatttgtgagagagatgtggccttctatcttggtagctatctggtttttttgttgttgttgttgagactgttgcccaggctggagtgcactggcatgatctcggctcactgcaacctccgcctgacgggttcaagcaattctcctgtctcagcctcccgagtagctgggactacgggcacccgccaccatgcctggctaatttttgtatttttagtagagacgggcttcaccatattggtcaggctggtctcgaactcctgaccttaggtgatctgcctgcctcggcctctcaaagtgctgggattacaggcctgagccaccgcacccagccagctatcggtttaagaaccaaaggaaggcaatctttgcaagactcagttcccaagcttaacaaagggcttctcagagatcttcacgttgtgagaatacaatgagaaaataacagtctgtaacccagaagaagaccttcacaagaacttgcccatagtgacacctgatcttagacttgcagcctccagaatgatgagaaacacatttctgttgattgcatggcacccagtctatatagaactttgttacagcaggccaagcaaagacattaaccgagagtcattttagtcttgtaaagttacatagagtcttttgaaattatgcaattctccaaaacttaagaaatatctgcctactttttaaaaagtcatctggactcatttttttctattccatttcactttgctttatttgcaatacccacatctcttcttattttctggatgtacttttatttgtgctatattctcttgctatctttgccccatacaacccttctctatcttacattaattcagaaaattagaatctatcaggcctaggcaggagagccatgccattagttttttctctaaactacttaatccaattgaaataatttcctcaggctcttattttaaattgaacttttactttgatttaagttgagagctttaaaaaaatggatatgccaaccacacaattgttttgtgctttttgcaaggagactgagaataaattggtctttgtcattcaaagtatatgtcaagtttacttgttaatgtttggaggtgagagtcggtgactcttacactaatacacctcactgaaaacatgtactacccttactcctgtcatgcatatctatcatgcatgcagactggccatatttttttctaaatatctctcttctttgtaatagtttttttattcttataatactttatcaaacacagccaacatgtatctgcatgttttaaatattttgaggcaatttatcaaattctcttttgtgtaatagaatatgatataacttctgcagaaattataataaatttcacttaatcaagtacttctggcttttgtctttttatgccatagttacttgcatctttaattatttgcaaaacaacataaaggcatttctagtactgattcttgtggagtcttttaatttattctttcagttttcaaacaacaactacacacgtattttacatccataaagttcttactatatggtaaaggttagacttggcccttgaactcatgaagcgtaaccggggagatacacattaaataaatgcaaaagtactgttaatattagagctctgaaagaaatgaatgtgatttttaaaataatttataataccatattattaaatcggagggtaagagtttcatgtagaagtaattcacgtagaaagggcaaatgaattacactttttcacttaggtggggtaaaataaagccccagagattgtatgtctgtgaattaattaacagggttaaaagtgtgtcatacattatagacgaaacatattcagtttgcatcaaaggattcagtaaaatgagttttacctctttcgatttttaaaattttcacatttattttgagagcatacatttgccttcttgtcattcatataagttttataacctgttttaatttaaaatgttaatatagtaaatgttgctgacatcctaaaattatgctaattaaatgtatttctgaggagaaaaaagtttcattagatgcttttatttttactttatcaattaaaaatgaaaaagttaattacttaatgcttgaatatatcttcttatgtatacataaactttagataatcagctatttacatcttaaaataattaatattagaagacatcatcctaataaactattttaacatttataataaatatttctcaaacattaccacctgcacatatataatgttaacttgagtcaaccatacatattgctgtgaaacactggtaagtagaaagagatatttatttgatgaaattttgtgcttaatactgtgaaaagaaacagtagaaaaataaggcagaaggaatacattgagttttagagttgaagatacagaaatatatctaaatgcacatatatagtatgattatatatataattctatatgtagtctatatattttatgtaatgataaatttataattatttatgtttatgtgtttcgttttgcttttttttcccccgagactgggtctcactctgtcactcaggccggagtgcagtggtgtgatgattacaaatcactgcagtctgaatttcaggggctaaagtgatcctgccatatcagccccttgagttgctgggactacaggcacataacaccatgccaggctattttttaaaaaaaattttgtagagagtctcactatgctgtccaggctggccttgaactcctaggctcaagtgattctaccaccttgagctcccagagtataggaattacaggagtgagccactgaccctggcccatatatgcattttttaagatttcagcaatttagcctttgggaagaagaaggcttgtaaagcttcttgcaaaatagcaattaattgataataaagcaaaggctatgtctgctctttttgaagctgttgaaagcaattgtaggatcaaagactgtattttaaaacctgaaattatgtataatgtaagagtagctttttaaaaatacaaaacaatttggaggctacaaaagttaaaaagtaacacaagaacttgaaacatcatataataaatgtaattacgtaaacatgaagttcttaatttcttagtattatccagatacttgtcaggcctccagaataatattttaatttaatttcctaaaatgtaatgcaaatatttcaaataatttaaatttatattgaagttatctacaaaagtgttgaattactactttcctagtagtcattatatgccttcccaaatttcaaatgttaaatatctgctcctcaaaaatatatttcctgctttttcattcaaaaatttccttaaagtttttaatttatatgcactctcttattccctttctttaacctgttgtctgttttatattacatttcctaaattccataatctactcaccttagacttctctaatatgctttttgtcctttaaaaataagaatcaattttgtcatatttttcttatttttccaaacctatgtggtgctcttcttgtaaaaaataggacaaattttgaagaatcaagcaagaaaaacattagatgttgatatggtttggctttatgtccccacccaaatctcaccttgaaaggcaatcctgtaatccccacgtgtcaagggcaggaccaggtggaggaaattgaaacgcagagacagtttccccatgctgttctcatgataataagtctcatgagatctgatggttttataagcatctgacatttcctctgcttgcattcattctctctctttgtgccctgtgaagaggtgccttccaccatgattgtaagtttccttagccttccacagccatgcggaactgtgagtcaattaaacctcttttctttatataagttaccaagtctcaggtattctcttatagcaatgtgagaacagactaatacaataaactggtaccacagacagtggggtgttcctataaagatccctgaaaatgtggaagcaactttggaactgagtaaccagcagaggttggaacagtttggaaggctcaaaaaagacagaaagatatgggaaagtttggaacttcctagagacatattgaatggctttgaccaaaattcagacagtgatataaataatgaagtccaggctggggtggtctcagattgagatgaagaactttctgggaactggaatgaaggtcattcttgctgtgcattaggaaagagactggtggcattttgccccttccctagagatctgtggaactttgaacttgagacaggtgatttagggtatctggaggaagaaatttctaagcagcatgcaagatctgacatggctgttcctaacagcatacagtcatatgggttcacaaagagatggtctaaaattggaacttatgtacaaaaaggaagcagaacataaaagtttggaaaatttgcagcctgaacatgaggtagaaaggaaaaacccactttctggggaaaaattcaagccagatgcaaaaatttgaataagtaatgaggaaccaattgttaatcaccaagacaatggggaaaatgtttccggggcatgtcagagaccttctcagcagcccctcccatcacaggcctggaggactaggaggaaaaagtggtttcctgggccaggtccagggccttgctgctttgtgcaatctgataacttagtgccctgtgtcccagctatggctagatggggccaacatatagttcattccattttttcagagggtgcagccccaagtcttcacatcttacatgtggtgttgggcctctgggtacacagaagtcaagaatagaagtttgggagcctccacctagatttcagatactgcctggaggtccaggcagtagtttgcgaggggtggagtcctcatggaaaacccctgttagggcagtgtggaataaaaatgtggggttagagcccccacacagagtccctactggggcactacctagtggagctgtgagaagaaggccatcatcctccagacccacaatgtgcctacatacatcttgcactgtgcacattgaaaagctgcagacactcaatgccagcctgtgaaagcagctgggatgggggctgtaccctgcaaaaccacagaggcaaagctgtccaaggccataggagtccacctcttgcatcagcatgacctggatgtgagacatggagtcaaaggagatcatgttggaactttaaggtttaatgactgccctattgtatttcagacctctatggggctgtagcccctttgttttggccaatttctctcatttggaacaggtgtatttgcctaatgtctatgcccccattgtatctaggaagtaactattaataacttgcttttgattttacaggctcataggaggaaagaaattaccttgcctcagataagactttagacttggatgttgaattaatactggaatgagttaagactttggggaactgttgaaagggcacacagttgtattttgaaatgtgagggcatgtgatttgggagggaccaagtgccaaataatatggtttggctttgtgtccccacccaaatatcaccttgaattgtaatccccataatccccacatgtcaagggtgggaccaggtggagatgattgaatcatgggggcagtttcccccatgctgttttcataataatgactgagtctcatgagatctgatggttttttaagcatctggcatttcctctgcttgcactcattctctctcctgccgcactgtgaagaggtgccttctgccatgattgtaagtttcctgaggcctccccagccatgtgaaactgtgagaaaattaaacctattttctttataaattacccagtctgagtattttttataacaatgtaagaatggactaatacagatatcaagaaaaagaattaagaaaatatgtatatgtaaaaatatatagcctttctctcctacgcttatgggctagcaagagtgggttttagtaagctacgtttatttaaaagcactcaaatctagtcaggcatgccaggctactcacacatccttaggaggctgaggtgggagggaaacttgagtccaaatcagactaggtgatataggaaaattctgtctcgaaaaaaattactcaaatctgaatttgaaagttaagtgctcatacttttttattaaagaaaaattaaatatctcagaggaattctcaatttccaaataaaatgatgtctgttgttaactgttgtcaatgttgggaaaatgtactaattgtctattatctttgaacaacaggatagtgacatcttatacaatgaggcaaacaaaactaaataaaagtaatacatattcaagctaaggttccttaacctttaaaataaatatatttttagactgaattttcatcacttcattgcaattctttcttatacatgtttgtgtttattggtgaattttatgaatatgtatttttaattaaatttttaaaataattattataattttttctatagtgtaatataagttgtgccctcctcatcccccaaaataagaatgttttctctcctctctctctctccctcctgtattgtgaatattaggataaaatcctttttgtcagactccataaatctagagccaggagagcaggaaaagggaatgtttatgcttgcaagtcagagagtaagactatcttaaaaactttgtaaaataaccacacaagaaattatctctttaggactatagaaatttagataagatgctcttgaaagaacacctgtccagtaatggcatctccaccaatgaaatgatgccaactcttactctcagcccccaaaattaagaaactctgtatccaagcagcttatatgcagctctcctttgctaataaaaatttccctttaccctcttctctctcctctttagattcataagtagattgccataactgtgcatcacagattatagttctcttttctaattcctgttaaattttaaattcaacatagttggagatgttttttctctgatttttgttttgttgttgactaatctgatgtcagaaatggccctgagctagattaccttcagaagagcttgtcaactcttggaactggctagggtacaattgagccatttgtgctgtctgtgttctatggattgctcttttctgcccagttaactcctctcaggttgagcttcctccctatggtaacagctccttgttaactttatttgtgatctgatttggttaaggcaccttcataaaggatcttacataccttctggaactataaaaggctttttgcctggcaaattctttctggaacaaagactttttgtctttctaatcttggcaagtactcttctggcttcagttttattctgagttgtgtatttacacttgtacctttggctgttgatggacctttcttctctgtttctggacattttctgtgattaataagaaaaacaatggaaccccaaaatttcaaagcatgcaaaaaaaatttctcttctggtaccccagcccagacattatagttctctctcatgaatgtttttaaatcaatgggagaagtacactacaactgatttagacattcaatggctgtcctggagatcttctgagtttctgaaatttatctttctcaggactaaagtggaagacaacagtcataaaattaaacaacctgaggagaagatgtattagtttttgcactgctataaacaaatacatgaaagtgggtaatatataaagaaaacgagtttaattggctcatcattctgcaggccgtacaggaagcatggctggggaggcctcaggaaactttcattcatggcaagaggtgaaggagaagcaggcatgttttacattagtggagctgaaggaagagagagacagtgggaggcgctacacacttttaaaaaatcagatctcacaataactcactcactctcatgagaaaatcaccaaaggagaaatttgcctccatgatccaatcaccttccaccaggctccaactccaacattgaggattacaatttgacatgagatttgggcagggacacagtccgaaaggatattattccaccctgtctccttccaaatctcatgtccttctcacatttcaaaatacaatcatgccttctcaacagttccccaaagtcttaacttatttcagcattaactcaaaagtccagtctcatctgagacaaggctagtcccttctgcctatgaacttggccaaaacaaaggggctaggggttcatgaaagtccaaaacccagcaaggcaatcattaaatcttaaagctccaaaataatctcctttgactccatgtctcaaatccagggcacactgaagccaagggtgggcgctcaaggccttgtgaagctccacccctgtggctctagagggctaagcccccacagcttcccaggtgctagcattgagtacctgcagcttttctgggtgcatgatacaagctgtcagtttatctaccattctccagtctggaggatgttggcgctcttctcacaattccagtagacaataccccactggggactcttcatgtgggggtctgaactccacatttctcttccacacttcgctagtaggggttcttccttcaggcttctacctggacacctaggcttttccatacatattctgaaatctaggtggaggcttccaagcttcaaatcttgcactctgcacacctgcatgcttcactccccatggaagccacagaggcatatggattgcaccctctgaagcagcagcccaagtatctgggcccctttgagccacagctagaactgtagcagccgggatgcaaggagcagtgttctgaggctgtgtagggcagtgggaccttggccctggcccacaaaaccacgctgtcctcctatgcctctgggcctgtgatgggaggggctgccacaaagctccctgaaatgacttcaggtcctctgtcccatggtcttggctattagatacttttcttcctttttgctatgcaaactttttatagcctgctttaattcctcctatgaaaattgatttttcttttctaccacatggccaggctgcaaattttcaaacatttacactctgcttccctttgtaatgtaaattccaatttcaggtaatttctttgttcatgcatatgagcataggcttgtagaaacagccaagccatgttttgaatgctttgctgcttagaaattttttctgccacataccctaaattatctctgtcaagttcaaagctccacagatccctagagcatgagcacaatgccaccaggttctttgctaatgcataacaaaagtgacctttactccagttcacagtaacttcctcatagccacccaagacctcatcagcttggggatctctgtccatatcactgtcagcattttggtcaaaaccatttaataagtttctaaaaagttccaaactttctctcatctttctgttttcttctgagccttccaagctgttccaacctctgcctgttacccagttccaaagctgcttctacattttcaagtatctttatagcagtgccccactcctaggtacaattcaattttctgtattagttagttctcacattgctattaagaaatacctgaaagtgggtgatttacaaagaaaagaggtttaattgcctatggttctgcaagctgtgcaggatgcatgtctgggaaggtctcaggaaacttacagtcatggcagaaggataaggggaagcaggcacatcttacatggccagagcaagaggaagagaagaggggagcaggtgctacacacttttaaccaatcagatcagtgagtaataagtcagtcactatcatgaaaacagcatgaaagggaaaatttgaccccatgatccaatcacctcccaccagccccaactccaacattagggattacagtgagatttgggttggtacacagccccaaaacctatcagaaggcatatgtcaatagacaccttggaacttctaagcatatttaaaatactaaaattgcctccttataaaacacaatctcaaaatcaactgaaaagaacaaacagttaaagatgaacagaaagtttctagaagcttggatttgttttgtctctggagactttcctttctctttttcccactagctcctcttcatccttctttacctaaattaactttccctccagattcctcagcacccctcacccccaagcaaatttagactcctaaaaacctatctctttaaaatgcaactcactggtaatctctttggaccccaccatatcaaccagccctgcttcagaataactaactactgcaaagggtaaggatttttcaataagccttttagtgcttttgtttcacaacccattcttttcaatctttgtcttcttcaggatgcccattcctttttgcatgttaattctgccctcctttcatgaatttgggtgtgattttctggaaaaataccatactgaatttttttttatgaaacaaataattttagaatgtgacaaaccaaattgtgttgactcaagcttgaattcccctgactcctcaaattctcacatttgctatttcattccctctttagagaagaaaaataatgccatgcttttactactaagtcaaacacctgcctcttgacttaaatatgaaaaggaagacaacactcacatagaaaaaagaagacagcactttgagtcttaacccaaagcacagatcccaacactatccactagaatactgtaacccataactggattgtcttactctgaattttgtctgcctaagtgctgtttcttctgcagccttgttagtaaaggcaactgagaagatactcatgggatctccaacacctgtatgtgtgcctaatgtagtggaaactctcttaaactcacattgtagtgaggcaaacctcgaaattggatctcagcccagaaggccatgtgagttcttggttttgcatagaaaagaattcaggagtgagctcacagagtaaagtgaaagcaagtttattaagacagtaaataaataaaaggatggctaccccataggcagagaagcagcatgggctgcttaagtgactgcactcatagttatttcttgattatatgctaaacaaggggtgaattattcatgaaatttccaggaaaaggatggggaatcctggaattcaggttttctccccttttcagaccgtatagggtagcttctcgatttttccatgccatttgtaaactttcatggcacaggtgggagtttcctttaccatgctaatgcattataattagcaaataatgagcagtgaggatgatcagtgatgctttcctcaccctcttggttttggtgggttttggttagcttcctgactgcatcctgttttatcagcagggtctttgtgacctatatgttgttaaacaagtcctgccaattttctatctcaacatcactctcagtattttataccagtcaacttactttctatgacctgcttctatttgtggctcctcatgtcatttcctcatgctgcaatgaccataactctgcaactcccttgccctctcctttaaaagagataccacatggctgcccaatccaacagaccaccttttaacttctcaggagaatctgcaaaagactcctatggaaaatgctgagttgccctgttttacagatgtctctcatttaaagaatgacactaaagagtgataatttaagtgttatttttaaatatgagtaagtattgtgcaggctacaattatcctccttagaaattgtggaggcagctcctttgcctttagcacttcagcccagcagatggaatgatttgccttcactggaggctgtcttgttgctaagggaaacttttaatgtctataaagacagtaggtatgcttttggagttgcttataattttggaatgttgtggaaatgaggagattttctcactctcaatggacaaaatgggccatatgtaaaagaattaccagatgcaacacagctacttgctgctttagccattatccaactctttgaccgtttaaaactaaatgctatggaatcaagaggaaatcaccttgctgatagcctggcagagagtgctgcccttaaagtcctacttattaatcaaatctctgccataatccacctagaaaaatttctcaaatatcaccttaaaatagttactaaagatgcacaaaattgggcaacagagaccaaaaaaaaatttggaaaaataatggctattggtttaatgacaaaagaactctggtttgggccagatagaaagcctgttctctcagactccatgacatttttgctgttatctactgtacatgatttaaatcactgtgctatagaaaagatgattacttttataaaataatactggtggcgtaacattcacaaaactgccaaaggtgcttgtctggcctgccccacgtgtcctaaattaaaccttggaaagtaaatgcaaaccgtgcctcaccattttaaacttcctaatgagccattcatgatttggcagataaatattatccagctacctaccacacatgggtacaagaataattcagtcataatctgatgttcttccattgggttgaagcattccctgaagacaggccacattccctgaagacaggctagagtcctattaaaaaaaaaatccatacctgaggcatgccctcaagctccacagcaagtgacaaacttattttactgcacaagatatagaacaagtgtgtgctaattggctagcattgtagcacttttattatgcttatcactctcagttctttggaattgttgaatgcattaatagtattttaaaaacttaattggaaaagtttatagaaaccttatagttaccatgaccaaatgccctacctatagtgcttcaagcttaagggcaacgctctttgaattccataatttttcacatttccagtaattacgggatgccccaggcatttgatcccaccttgttttgaccccaaattaataaaaggtgaaatgtttcaatattgtaagggtataatcaaggttatgaataaaaattgtactctgatagaacaatattttcacagtgcactcctgggagatgaagacctaaaacaccataaccgtatgggcggagtggctgatgcctgtaatcccagaaaattgggaggcagaggcaggtagatcatttgagggccaggagttagagaccagcctggctaacatggcggaaccccatctctactaacaatataaaaatttgccaggtgtggtggtgcatgtctgtaatcctagctacttgggtggctgaggcaggagaatcagttgaacccaggagagggaagttgtagtgaacagaaattgcgccactgaaccccagcctgggagacagagtgagcgttgtcttaaaaaacaaacaaacaaataaacaaacaaaaacatcataacctacaaccagggtattctgtctattgaaaaagacatttacaaaaggattacctccaacctctctggaaagccccatgtcatgtcttattcaccaatcattgtgcaactaaacttacagaaattgattcctggatacatatgtctcttcaaagaagacattggctcctgagtggaattgcatctctgttgacaaatacaaaataagtatttctaggatttaaagcagatgacatctagtggttggtttctccaaaaattcccaggactgggctgtatacaatactttcacttataatttttactttttctccctccttcccctggaaagacaataaccttgtctgtatttcccaattcatcactatggagggaggataaagaagagtcttactaattgttgtaaaaaccttaatctgtctctgattttaatgacttcttagttttacttgtaatgaatttcactaacatcccaaatccaaccacccatacaaattgtatcattggaccctcttataggattaagctttctcatttatctttaacttctgtttcctgcctcaccttattaaataagcaacctcccagctgggtcccaggaatgtgcaatgaaccatccctcttaaaccattcagcagcatatcctaaggtgcagaaaaaaattattaggactggcttaaggaggaggggtaattaacaacttgcaatagcataactgaccgtcgtcagcttgattgtgtatcatacagaaaaatcacagatggaaaaattgtctgtgttcctactggctatatctacttttgtggttgaggcacctcagcatgggcctccaaatgttttggcatttagacaacaggaggtgaacatgggattggatatttgacctctgtattgtcaacatgtaatagatctgaaactgatcactgagtaatcattgggctgctccactcaggttacatcacagaaccaggtgaaatttcccctcatgactccctagtgatgacaatcatttctatgctgttttcatctgaaaaatctttccctggggtggaattttggctaatgaatgagtgattcaaaatctctctatcaaccttagtaaccttgcagactccactgcagaggctatcactgcacagcagcactcattagtttccactgccagagtaattttagataacagaattgctcttgattatctgttagctgaagaaggtgacgtctgtgctattgctaataaatactacatgctgcacttggatacactcctctggagaagagacacagttacaccaaataagagaacaacccacatagctacaacaaatctcagccagtcccacatgctcatttgatttgttcagttagttgcctttaggcctaggcttatcaattgaaatcaccatgcaaattggagttatcatattcttggtcttttgactttgtatttttctttttaaaatgtctgcctgctggccagagacagtggctcatgcctgtaatcccagcattttgggaggctgaggcaggtggatcacctgaggtcaggagctcgagaccagcctggccaacatggtgaaaccccatctctactaacaaaagaatacaaaaattagcctggtgtggtggcagcctcctgtaatcccagctacttgggaggctgaggcaggagaaccgcttgaacccaggaggtggaggttgcagtgagtcgagatcactccattacactctagcctgggcaacaagagcaaaactctgtctcaaaaaaaaaagcgtgcctgctgtctatcaaatttccacagaaatacaactcctaacaatgatgaagacacagcatcttgaaatgatagccaatacctatggaagaaacaaaatcaaacagtaatataatccagacagacttaaccttgagaactcctccttctggcctccttgttcaaatgctgcatacaagtgtcttagcactaacttccaactgttgatcacctccacaaatcacaaccaactgtcttaagcagatctatcctggcacactcaagacttcactagaggctgattgatcaacagtgcatttggagaaagaccttggtaaaaaaaaaaaaaaaaaaaaaaagggcaatatgaaagttgcagatacaagcatgaaattattttttatcagacccaaacctattagagctagaagagcacaaaaaaaaaaagattgtcttaagaattttctaaaataaacccacaagaaattattttcaggaaaaagagggattattttcctaaacagtgcagcaattcacgtaatatgctctcaaaggagcacccacccaataatgacatctccaccaatgaactttgactaaccatgcctttcagtctccaaaaatcaataaactttgttcctgaggagcttatgtgaacccctttgcccaaaaaattttcctttaccttccgcttttcagacgcatatgtggcttgctatagctgttcatcttgggttacaatcttttctgatttctgaataaattcaacatattgggaagtatttttgccctcatttttggggggcttgatactgtcatgctctcccccaagatctgctcattttcaactttaactttgatcaacgatttaacaagaaaatagtgaaaaaacgaagaatatcaaatgtatgagctcagagacattttactcagcatgtatttatgttcaagttttaggttgaatcttgttttctgctgacaatttgtgataccctacagacaagatattaccaggatttattcaacagaaaatcttatctgcattctgaccccctgaaaggatacccagatacaacaatgataagtgctgtcatgtagaaaagttatggatgccttcatgcatatggtaaacattcttccattgtgtgtagagctttagtaggctgtttaacccaaaacactgcatggctcttcttcttgaaaccaagattttctccctaggggtggcttagaatatttgtgctataaaaggtattagaaaatttctatgtaatgggagattcatgctcataggaaaatgtggtatctttatgctgaaaattgaatttatattctctcaagtttagtaaactctgtaaaacgtgatgatgcacataagaaacgaaactacctaatgttaaaaatgtccaatattattttgttagattattcttaattaaaatacttctcagtgaatggctgcattagcctttatcaactctatttacacttacacaccaaatacagtccatatagtcatgacagaatgaagaatggtaagagagatgtaaggtaatgagacaatgaagactgggtgaatccatagattttactcactttaatacaattttctaagaacttttagaaagtgaatatttaaaagacagtgtgaagtagtacaaaactcactaaattattaaattatctgtctctcagtatagatatagatatacatatttatctctctatatatgcataattcagcagtagatctctaaacatatttaatagaatttcagaaaaaaattgaaaccaaattttgtgaattaataaattactcagtagatttaacattttagttaaagtgtttctgtcgttttcattttggcgctactttaaagagtttttaatatgtttgtatagtgtctcataattacattgaaaaatactaagataattacattaaataatttttaggtaacactgtcaacttagacgttcatcttgttttggctagacttttagactatttttaaattagtcttcctatctctcacataagctcccttaatatagtcatccctcttactatggatgaatcactattaaaggcaaatcagtttgtggcattttcattgtacatgcttcactgactccccattactttcaagttgaaataggaaaaatttagcatgacatgctactgtggtgtgaatgctccccaaatttcatatgttgaaacttaattgccaatgtgacattataaagagtgcagtctttaggaggtaattaagtcatgagggcagagcacttgtaaatgagataaggtctttataaaggaggattcacacggcggcatttgttccttttgctctactgctcttctgtcacaggagaacaccttgacaaggccatctctgagggacaagccatcactgaatctgctggtgccttcatcttggacttcccagcatccagaattgtgctaaaaaattcttttctttataaatcactcagtctcaggtattttgctatagtagcacaaatggactaagacacatacaaaccctttcatgtcctcacttctgtcttcatagtcttttactaacatatgcattcagttccactaatcatgcttctataatgaaaattttctaaaagtgcaatgcaattcagcattctatgataggcatagatttcttagttcaagatttgtgaaaaaaattatccatttatttctcaagactcagttctaaatgtttgaaagagaatcaagtttgaaatttgtattaggctccatccctaactatgtttttaatgagatcttatttttttgaatcataatgtatcttacaaaatgtaaaatgcataaaattgtacgaagtagaaagtcttcctccatcaccttcatctaatcacaagattcccctctggaggcagccgcatggttttaaaaaagacttcctggccgggcgtcgtggctcacgcctgtaaccccagcactttgggaggccaaggcaggtggatcacatgacgtcaggagtttgagaccagcccggccaacatggtgaaaccttgtctctactaaaaatacaaaaattagccaggcgtggtggtgggtgcctgtaatcccagctacttgggaggctgaggaaggggaattgcttgaacctgggagacggaggttgcggtgagccaagatcacgccactgcattccggcctggatgacagagtgagactccatctaaaaaaacaaaacaaacaaacaaaaaaattccttttccacatgtctagatccatacacatgtaagctacacctcttcaaatactcaaccctgtgcttcattcacaattattaaaattctgtgccagatactaaggatactaattaaaaaaaaaaacacagtttatgtccttacaaaagtaaattgtaaaagcagttgcaatacgttgttcttacaagaaatttacaacgcagtggactatgaattatgtatctaacagatagatatgctattttttagactagagagtgtttaagatatgtcataatttaattatcagtaggtaaaaaataatttcaggctttttcttgaaaaacccaaaacatagatacaatgaacatattttatgtggagtgtgtttaacttatgagtcataaagctcactctttttatatacatgtgtgcagttctatgaattgtgataaagatgcatcaagccatgtaaccacaaccataatcaagatagagaaaatttcatcactctctaaaaaatcttctttatgcccccttttgttctgtagttaaatgctttccttgcttttaaccattggcaaccagtgatctattgtctcttctaatagttttgtctgttgagaactacatgtaaatggaatgatattttattaagcctcagaagtctttaaaatagcattatacatttacgatgcattcatgttgttgcatgttcaagagtctgactcatttttgttgagtaatattccgtttgtgtgagtagaacccttttaaaaatttattcaaaaatgaagagcatttgggttactttctgctttggggattgtgaattttttataaacattcacatagaaataatttgtgtgaatctaagtcttcatttctttttggaaaatatctgaagcgaggatggtaggacatttagtaagtgcatgttttcttttgttttaatctgttaggttgctataacaaaagtgccataaactagatggcttataaacaacagagacttctttctcacaattctggaagctggaaagtcctagatcaaggtgccagcagacttggtgtcttctagctgtgtgttcttatgtaactgcgcaacaggttcaccttgcccactgcctagacggagttgatttgtcaagacaggggaactgcaatggagaaagttattggtgcagagccggcagtgtgagagactggagttttattattgctcacatcagtctccccaagcattcagggatcagagatttcaagaataatttggtgggtgtgggtgagtgagttgggagtgctgactgtttgggtcagatgaaatcataaggaatcaaagctgtcttcctgcactgggtcagttcctgggcggggggccccacgatcagatgagccagtttatccattgggatggtgccagctcatccatcaagtgctggggctgtaaaatatctcaagcactgatctttggttttacaatagtgatgttatcctcaggagcaattaggggagtgtcttgtaacctccaactgcatggcttctaaaccataatttctaatcttttggctaatttgttagtcctacaaaaggcagtgtagtccccaggcaagaagggggattgttttagaaaagggctataaactatgttcctcccaaagttaatttggccttcatccaggaatgaacaagaacagcttagtggttagaagcaagatttcagatttctttcaccacagtcataattttgcaatagtggtttcatttacatgaggcaaggagaatgggagagctctctgggtaagctttttaagggcactaatcccactcaagagggctccacctcatgaactaataatcttccaaatgtcccacttccaaataccatcaccttgggggctaggatttcgatatatgaattggggaagacacaaacattcataccatggcaccttatgaaaagattagagtttattttttagagcaattttaggttcacaacacaactgaagagaaagtacagagaattgtcgcataaccccatttgccccctcacacaactttcctcattgtcaatatccactggtacattcgttacaatgaattaactgatattgacatatcatcctgcaaagcagtttacattatagtccactcttggtgttgtatactctatgcacaaatgtataaggacatgtatttactattattatattaaaaagaatagtggcactgccctaaaaatcctctgtgctctgcctattcattctttccttttcccaaacttctggcaactactttaaagtcttgattagttttttttccctctttttcagaatgccatatagttgaaattatgtaacacgtagcctttttaggttaggatccttcacttagtagtatgcacttgagattcttccatgtcttatcatgggttagtagctcatatttttaatgcagaataatgctccatcttctgtgtataccaaaatttatttatccattcacctacagaataaccttttggttacttgcacattttggctattatcagtgaagttgctctaaaacatccacgtgcaaattgtgtgtggatataaattttcaattcattttgataaatgccaagaaatgagatggccaaatcttataagagtatgtttagtttcactgccattcaaactgcttctagtattttgaatttcccagaatgagaattagtgttgctccacatcatgaccagcatttgttcttgtcagtgttttggactttggccatttgaataggaatgtaggtgatatctcattgctgttttcatttgcaatagtctaatggcatatgatgctgagtctcttttcacatgcttattttctatttgtacatctttggtgacgcttctgatcaagtgttttgtttatttttcagttatgttgcccatttcttattattgaattttaaaagctattagtatattttggatagcagtttttttatcagtgtgtcttttgaaaatattttcacccagtctatgggttgtcctctcattgtctcgacactatgttttgaagagcagatgtttttaatttcaatgcagtttagcttaacaatttctgttagggattattcctttggcatggtatttttaaagccgttactttaaccaaagtcatctagatattcttctatactatcttctattatgttagtttttataagaagctgccaattgctttcaaagtggctatcctacatgagagttcaagttgacctgcactctcaccaggacttgaaattctcttttcttttttttaaattagtttcaataggtatatagtaatatcatattaatgatttctgttctactattgactaatgatgttaaagttttctgctcctcagggtctctgctttgtagttcctctagacaggaacgcaggtacacttttttttttttttggaacgaagtctcactctgtcacccaggctggagtgcagtggtgcgatcttggctcactgcaagctctgccttctgggttcacgccattctcctgcctcagcctccctagtagctggaactacaggtatccaccatcacgcccgcctaatgttttgtatttttagtagagacagggtttcaccatgttagccaggatggtctcgatctcctgacctcgtgatccaccctcctcggcctcccaaagtgctgggattacaggcgtgagccaccgcgcccggccacgggtccacttttgcttaggacagttgctcctgttgtttccatagttccttccatggctagggctggcctcaggagggcacgaggagagaagaaagggaaatcaagcaaacaccaaacaccaggaaatgggtttcccttcacactctctggcacatgtaggccccttttccattcttctgatggaaattgggattttctcctggaatttacattgctcacttctgtgatttgtttgaagttggaggcaaacaggaagatgcaaacaagaaactcattgctaagcgttgttatttaactttcaaatttgatctccattctacttgctattgtttgtttttcagtccccaagaagtggtattcagtgggagatgtgggctgtagccacttacccatttacccatatgagttgtagtcatgaccctatttaagccagcaccagaagtctggacctgatgctttgaatggcatcatctgacttctttataaaaggcagaacttcagaggcccctccaatcacactattcatacaaacctgtttcatgtattatccatgttctttttggctcctacgtacaattgtgatcatctcttaagaatagtgttacaggtagttggacaggcaagagtagggcaggaaagggccctcccatcaggaatgtgaggcaaccatcatgtgatggtacagtagttatcacattgcctctctaaaaatgataatttggcagctggctccaggcagagacaatctcctgatggtgcacaactatcacactgaagtgttaattgaatgcaggtaccagggagaggcaacttcccaaacagataaaaacacttgagatttgtaattggcttccaataaaacctcaggtactgggggagtgagactggacatgtgcattaagagacaaaatggcaggctgggggcagtggctcacgcctgtaatcccagcactttgggaggccgagacgggcagattacgaggtcaggagatggagaccatcttggctaacatggtgaaaccccgtctctactaaaaatacaaaaaaaattagccagtcatagtagtcccagctactcgggaggctgaggcaggagaatggcgtgaacctgggaggtggagcttgcagtgagccaagatcacgccactgcactccagcctgggccactgagcaagactctatctcaaaaaaaaaaaaaaaaaaatagacaaaatggcagactatgaccttccaggggcattccacaggaaaagggaaggaagcttcagatgggaatgcatacaccttcctaaacacaggacgcatgctcacttctcaagcataatgagggcactgcacatatgggcagcccacccttagggaagaatcataggaaaggggtgcaagacactgaaagtgggccagcatctaaagtcctaggatcaaggttaaatgatgcactagtccttcaagtcactcgctgggtctctttcaagtgtgctttcctttcttgcctgctctaaaactttgtaataaacttcgactcctgctctgaaacttgccttggtctctttttctgccttatgcccctcagtctatttttttcttctgaggaggtaagaattgaggttgctgcagacctgtacagatttgccactggtaacttggatactttctacctttaacgatagtactagtggaggaggaggaggagcaaagctgattggaagttggggaaatatcttagaatctatttttagttaagccctaaagcagaaccagaagctttaatgcattttgttggtgagagttgaaggagatggaatgacactccacacaaggatagcagggaaatgataacatctgagtcatagagattcccctctggctgtttccacccttctttcctattggagaaatataaattatatgtagtattaaatcagaatgtcatgtgcatcatgaacaacctgctaagagattgcaaagacttaagaaatctcagtcttttatttagccaaacagttacaacccattgcatacatgttcttaagataaacaatagctagtcctcaagtaagagaacttgacaccatcatttgttacacacagatcatcctacgttcacctgataattggggtgtttatctgtgtttactaattggatttatccaaaggaaaataatttcatatttttatggcagaaggtgattttggaacccagagcacagaatctgttaggcaaagttaggcacattgcttcccatagaaactggggctcttcatgattacatttcaaagacttagctcccaagtgctagagaaagacattcctatgtcttcaagctggctagagtcttatctagcttttaaacagatttatatacattttagggagacaagaaaataatttacaattacttacgttataattacttagaattaaaattacttagagcaaatgctctaagaaaagggcggtggagggagtctcttcctttatttttaacagggagaattaaagctcttttgaaaacttgcctttgcatcccccacagtcgttttgcaacatccaactagggtaatcctgctaagaaatgaaatattatcaagttactcctctacattccacttgaaagtaaaggccaaactattaacaaacatcctttcatcatgtgtgttttctgactccccattttattttattttaagatttttttaatgtttatttttaagttttaagttcaggggtacatgtgtaggtttgttacgtggctaaacttgtgtcatggggatttgttgtacagattatttcatcacccaggtatgaatcctagtttccattagttgtttttcttgattctctccctcctcccaacctccaccctctgaaaggcctcagtatgtgttgttcccctctatgagtccatgtgttctcatcatttagctcctacttatagtgagagcatgcagtatttggatttctgttcctgtgttagtttgctaaggagaatggtctttagctccatccgtgtccctgcaaaggacatgatctcagtctttttgtatgggttcatggtattctgtggtgtatatgtaccacattttctttataccgtctatcatttatgggcatttaggtcaatttcatgtctttgctattgtgaatagtgttgcaatgcacatacatgtgcatgtgtctttatggtagaatgatttctatttcttcagttatattgtttcaaaatatttaccaatacccaggccaaaaactagtggcatagttgacatctaatatatatttgctggcataatgtcatgttgcttacattcaataaatgttgtttttgaagaaattaatgaaaaattttaaagacaggttgcaagaacagaggaaaaaagtcccaaaaggaagttattgtaaaactccaggccagagacattgattgcctgaatttcactaaaataaaataatgggggaatgtgaatgtatttgagagattgtggacgtaatagaattagctagacttggtggttggctagagatgggccaaaagtagagaaagaagtcacagtaaattttatcatttcagaacgagcaaagggcaagtattaatatttcccactaagatatgaaattcagaaagttaattttgggcagttaataatgatttctattttaattatgaggttaaacactggctctgccacttactgtaagatattaagaatttttttttatagcttcctagcccttcaatttcctcaaatacaagaagaacaaaaatggcatgtaccacaaagtttttgtgatttttgaaataatacacacaaaatactaaaacaagtttctgcagtaaactaagaaatcactcacagttgctgttttgagacttactatattacttttatcactcactattatctttatcctccagaggaaagtgaatttatggttatagtgacacagactaaatataagttcataggattaaaaaatatatacaactcaagaatgtatatgataatcgaatccttgacaaacatgtatagttttatatgaatcaggattcaataataggtacaaaacccaaaatattttaaaatagagctgcaaaggaaattgagaagaaattattacaaagtagtagaataaatatgagagtggggcacaatatgacagaaaatgagtattacaatgctaatttgagaggttaatgattacttttgcttgcatgctcattgtttttctctttacctttgtctgtactgatacaaatgtcaacttaatgacacaactcagatgattcctgcttaatgaagtctattctgagacctgtaataaaaaattattctattttcggggtttccatggcatttaaatatatataatcagtgctcagacaaatctgttaataaattggctgataagtcatgttattctgtgagtttcttggattcagagtctttatttatatgtttaccagatgttatatactgaaatgtgttccccgaaatttgtatatagaagttttacacctagtacgtcataatgtttggagacagtgccttttaaaaggtgattaagttaaattgaggcagttacattgggccctaaatcaacgtgaatgatgtccttatacaaggaaatgtgagcacacatagagacaccagggatgtgcagggacctagaaaaacaatgtaaggacacaacaggaaggaaaccatctgaaagccaaggacaaagacataaggaaaaaccatactgctgacatcttggtcttggacttctagcctccagaactgtgagaaaaataggtttctattgttgcagccacctagtctataatatttctttattgtagccctagcaaatacacaagggttttgggaaaccttcatatgtcagtttcatgaggccattcagtctacacaaattatctccataacaactaaaattttaaatttttagataatttcaatatacaataactatatcctgattattcataagatttaagaaaaacataattttctctattgtggatgagttttctggatccaattatttatgatactgaatttcataggaagttgaaagcaaagcaagtttttgtttttgtaaagtaatacagtttaaaaatgttcattgaaagattgactaaaatattttagattctaaatgaaaacactaaaataggtgcataagacaaaataatgtatttttaaattgcattttgagctgatttttattcattctatgtaactgattttagggatgtgttgttttttttcagtccacatgaacatagtggtataattaacaaaatggagttaacatttctaacatctcctaagcttgcctaaattttaggcaggtttcttctagactctaggcctaggatctcccttttcttagaacacttatgttagaaaactggcaattgtaaattctttcactgcccctttgagatgcaaattttctgcccagtcatgcttgttaccaggggttccttgctcccagagctcccaagatggtggtgggctgcttccaaaatggtggcaagcctcgtgttctctgacctggggttcttggcctcacggatttcaaggaatggaatcttgggccatgcggtgagtgttatagctcttattagaagccgtgggtcacggaagagaactgtggaacctactgactcctgttcagctcaattaggacgaacccaggcacttagctgtgcaggaacaagggcaagcctttagcccaatcaggagtggcaatgggtgcctcgctggatcagaagcacagcggacacccttccagatctggagggatggcagtcagcggtgggtctgtgacagcggcgggtctgtgacagcggcaaacaccagtggtgggcagcaagtgaaagctcagctcgagctgtaacaaacacggaccagaagaatgcagttgcaagatttaatagagtgaaatagagtgaaaacagagctcccatacaaagggaggggactcaaacagggtagccgttactggctcgaatgcctgggtttatgtcctgatcattgtctctccctctgtgctcttgggccatagatgattggctatttctttacctcctgtttttgcctaattagcattttagtgagctgtctttactatctgattggtcgggtatgagctaagttgcaagccctgtgtataaaggtggaagcagtcaccttcccagctaggcttagggattcttagtcggcctaggaaatccagctagtcctgcctctcatgctgactaacctgccgctcgatgtcctctagtacttgtgcactagctcataccagcaattaaaaactctcctggagttgttttaatgtaattgagttcaatctctgttctctgttgcaagagtcttgaataaagccattattgcctgtttaatatgtctgttgaaattttcattgatttaatatagaaaaactggagtttattagtgtttatatgtatttgtttctttatatatatttctgagaatatattcacttaaggtatatgagaatagctgatctttcataccaggaaatatcaaacctaaaagcacatgtcattatgtaatgtggatagaagtcttcttttgaaacataattaccctcctcatatatgttctatcagatcattaacattgcttagataataaaatatcacaatatagagagatgtagaataaagtgggaagtatttttccaagctatttagccaggattgtctccccagaagaagcaagaataatgcttttattcaaaagttaaaaggaaaataatctcagtgaaatgcaaactctttgacatataaaaaatgtggcatatgcacaactgtaaaatgatctttgaaaatttatttttgaaaataaatcccagatgtcattgatgcctttcttttttttttttttttttttttttttgagacggagtctggctctgtcgcccaggccggactgcggactgcagtggcgcaatctcggctcactgcaagctccgcttcccgggttcatgccattctcctgcctcagcctcccgagtagctgggactacaggaacccgccaccgcgcccggctaattttttgtatttttagtagagacggggtttcaccttgttagccaggatggtctcgatctcctgacctcatgatccacccgcctcggcctcccaaagtgctgggattacaggcgtgagccaccgcgcccggccgatgcctttcattttaactcactttgtttgcagttttggagtagtctgtgctataattttggacagactctattgtctgacatgataacaattgtaaaatactgacgaaggcaaaaacgtgttctcaaactcttttggtagagattttaagggctggaaactcaaaatggagtagtttgatgtgtccttaatctcttctcaacagctagtgtagagttgctgactttctcacatctctgagtgagcaaagaaaggaagtcaaaggttaaatcaatctgtgttttagtaaataggatatggaaagctcaagtccacagccaggcttaacctgacttctgcttgaccacaactattaagtagaacacttagtaagtgtacaaagtcaagacgcttgcccttggcaagagaggaagaatgaaggaaagatagtaatgagtctgtcctatcacctgggaacatgagaaggctacttatcctcctaagcttcccattcactgccaaacactgtacagaaaacaaacaatagctttagtctcctggcactgttacattacaatcccaaaccacttactctgtcattagttctccatagtcaaaaactgtgaccttatccataaccactagatgttttccagtggccaataattactttgttagtaaaataaaagttgtttctaaggttctgttaaaaaaaaaatgggttccaaatattcaatttgcattttcatccaatatttatgagaaaaaaaatacatactttgtggtataccatatgctagtattatacatggaaaagaggatacaatgatggttctacaagaaataccgtcttgtcagagacagattccaatgtagtgaaggtcagagtaattatcaaatgcacaattacagtaatgaaaggtacaataacagagaagtgcctgggatattaaagtttgctaaaatttattaagaactacaagctctatatcttaatgtattacacaaactcaagtgtaaaaaagaaagaaaccaacaaagtttgaaaaaatacatgtaaatgatatataaaatatgctacctcttatttcttaatgattatgtactaaaaggtttttactgaattttttctaattttaataagatattaaatttataattacaaaataatataagtgtgttcagagtactacagtttattctcttcttcaagttatttgataatattagcagaataagaaaaaataccactgcacaaaggacaaaaacatacaattggtactctctgacagaaagaaacacatctataaacacttactgtttattgggtgaaataataaatattattgatctacagttacatgtctaaaacatttcattgattttgttttgtatttttgttgctcacactatgaatgcgaaagtaattacacacaccacaaaaatctcttgtattcataaacaaaattattcctaatagaaaaaataaaacctacactgtcaccaaaagtgtataagtgttgactacctgagggtggatggtgagaggagggagaggatcaggaaaaataactaatgggtaccaggcttaatacctgagtgaggaaataatctgtacaacaaatccccatgatgcaagtttacttatgtaacaaacctgcacatttactgttgaacttaaaagttaaaaaaaagagaaaacctaatatttctcattaatactctaccagtaccaatcatcaacctctttcaacagattagaaaaaagatattcagattttattgtcattttcagaaaatgtaagagaaatttaattttgttggagaactgccaaatgctttattagcataatgatttcaaggtacagattgctggaaatagagtctagaacataaagggtaggagattggtcagaatggtgggagaaaatctagggaaaggggcaggccttttgaaaagtcagaaggctctgcttagcttcggtggagaataaactgaaggcagctcttctctgaccctgagggagagggcaaggagtaggtacaaagaagtataggggaatttatcctaaacaggcttgttcacttacgttgaccaggaactgacctttgatcatccgtgtgcatgacccgttccctgtaaggggaacaataaatgttaattacccacagactgtgtttgccccaggctttcggcattatgtctgtactgagtgaaagcaagcagctccagccgtttgagactgctcactctctggccactagtgccaggcagtcccctagctgctctaacactgcatacctgtgtctgagtactcgtttcatccatcactaggccaaggtctgcaggatggacccggcaataaagcttgtgtatttgactgaaatgggaaatggtcacaaatttcttcatccttggtgaacttgcctctttgcaatgctattttcctgctactctgctcaccaagtggttgaaagtacttcttcaccttgtgtaatcagggctggtcttgtgatttgtggtgatggacagaatgcagtggaagtgcagtgtaggaattctgatcctagtcctgaccaggaaaggaagtttccactctcactttcttgacaaattgctttgaggttgctatgtgaaaaatcttggttaatcctattggaggattagaaatcacataaagcagagctattgaatctaagttccttcagaactaccagcaaatacgagacacgtaagcccactttggaccatccagcaacagtagagtcacgagagaactagggtctcacaagtgaccttaggcaaaacttgtggcagaactgaacatctaagcccattcaaaattgctgacatacaggattatgaacagcacataaatcggtaatttaaagtcacagagttttgttgtagtttgttataaagaaacggataactggtaaatctctaagatgtctattttctgaaataaaattaaatctgttcaggagaccttgatatagttctttgaataatacctaataataaaaatagaaagtaatatttattggtaagcaatgtgctaaatattttgcatttattgcctccaataattctccaagtaataaataattttacctttcgtttttatttccattgaaaactaggataagaaatgttaacttgaaattttatctgaagtgttttttccatatacatgcattatcttttaaagtagagtaagataaggcccaacaatatataaactaattatccatacataattaagtcatttgtacttttcataatttaaaaaatcattaaaaataaatcaaaagtgaacatttcatgtaagtatacatgacactttgaattcctaaactataaaagtaataatcataaagaattaacctatatacagttatttgcttatccaaattgattaagatgatgcgtacataaaatgccatgtcctttatacttaataatttattctgtatgtgtactgtttgtttagttctgctagagatatgctgttctcaataaagaatgttttgaaaaatactctaatgtaattactagatttctataataacttgtcaactgtaacaatttattttccagtatatgcttatttcagaagtaatttcttgggaacttaaggataaagagaaataattaaatgtgaggaataacacatacatataaataaaacaaatggaagaacagaaacagaaaatatcttaattcaacttgagaataaattaaataatatcttgggaaagggtaaagattctgtgagataataaatacacattttttaagctgctaaatgtctgagtaatttattatgtagaaataaataattaatacattgcaaattagcaaaatgctagaaatatgtaaggattcatttatgtataccaaatgtagatgcttttgtaggtttactcctaatacattttacaggtactgtatttaaagaaaaaataatgtctaaaattttcatcattgcaattcatgggaaattgtgtcagtgtcactgttattgtaattacttgtaaataggtaattgtaactagattgttaaaggagtaataaatattgttaaatgggagatacattttatagaacattttcttcttacagccaaaaaatgttgaatgttattctacactgagatacatttgactggagaggatgtgaatgcctggtccaagatacatataacaaagtatatctttaggaatttgatatcagtcttaaacataggatgaaagacaaagctcttttatcatctcccaaattctcattttccttttgtatgcctttttcgaaagcttttgataatgtatttcagattcattcatattgttttctcttttattagtttcttaattattcattttccaattgaggggcattgtgttgtttccaggttttggcaattacaaataaagcccccatatgtatttgcttcccatatttgtgtcaacgtagggtttcatttcaattgggtaaattcctaacttgataagaagctgcaagtttttagagtggacataatattttgtatttcattcatcagtgtgtatgaataccacctcctccactagttcttgatattttagattattttattttaaaaattatttattaaatgtctgtgcagggatatctcattgttttatttgcattttcctaatgactaatttgttttcttggtatctatgtctcttttgtggtcaggtatgtgcttaaatctttgtctcattttgaaaattgagttattcaattcattattataaagtgcagtgtgctttttaaatactggagctcatttaaaaaatcagatttcttattttcatttttcttctaccagtttttagtttctcttttatttccttagcagtctcctttgaagatcagattttcttaatattggtaaagtccaattttttttaatgaattggtctttttgtgtcatatctaacaaaactttgcttaatctaaggtaacaaagatttttttctacattttcatttagaaggtttgtatatttaggttttataattaataacccatttagggttactttttgtaactcaaagataatgtgaggtaggaatttacacttttttagttacactcacacaaacacatacacattcaggtttgttttgcagttaggttaatgatttctcatgagtcacttttctaactcaaaaatggtgtaagagagattaaagttattttatttgcataaatgtttatttgtttcatacgatttctgtttgtgtgtttgttgaatatcaattgattatatataactatttctggattatatattttgttctatttatctatatgcctgtactttgtccagtaaaaatctgccttgaataatacagttctatcatagatatgaataggaggtactaatgcccttcaagaacacttttgccttcttttagaaaattgttttgggcattttaatttctttacctttcaccaaatatattaaggatgctactatctaatatgtatatatatattcatatctatatttactgcagtgacattgactatacttcttctaatgtgtagattatgaagataattaacaacattgagcattacaatccatgattatggtatttagccctacttgtgttttttgaattcttttatcagtgctttgccaattttagcataaatatattaaatgtatatagtaaaagttacaactaattaccttattttctcagtgctattgtatatgttatgtttacttttcttttcagtttttaattgttgcaatcatgtagaaatggaattaaattttgtatagataacatattgaattttataatagcctttttcctaggaaattgttaaacatattttttcagttctagtacatattttgaatctttcaaatttatacatataaaatcaggtgtcagtaagtagatatttttataactttcttttaaatctgtatgactttgggtggggataggtcttcttgtatgtcctagggtcttcaaaatgttattaaatagaatcgacattcctatcttgttcctgatattataggaaaagcacttagtctttcattgttcaggatgacattatcttagaattttcttagatgaacttaaaaagcttaaggatatattattttatttctagtttactgaatattcttattggagatggatattaaatttggtcattcgctgcttctgcaaatgcaaatgaccaaaaaatttaaggttttttttttttttttggatgaggtggttattcttggttggtctcttcatatgattagttatattgcttattttttgttgttgaatttgttttgcaaccaccaaggaaaacacacttgtctgtctgtatttgccattttacatattgttgaattaaaatttcaactatttctttaaaatattgtatgcccatttttatgagagattttggtacatagccatctgtttttgtaatgttattgtcttttttatatatcagagctatgctgtcctttagaataatttgggagtattcacttctcatcagttttccagaaaagttgtttgtgtaggatttggtactatgtccatatcaatatttggtagaatttaccgtttaaactacttcagcctggtgtgtgtgtgtgtgtgtgtgtgtgtgtgtgtatgtttgtgtgtgtatgtatgtttgtgtgtgtgtgtgtgcatgtataaatgtatttaacaaatattcaattttttaaaaaaagatatagagatcttctgttgtttcagtaatatttgctagtttaaagcaatttatctctttcatctaaatggtcaactttatagtaaaatgttctcttattatcttttaaaataagcagaatctgtattgatgatccagtttcattgctaatgttggtcatttgcatcttctaactcattttatgcatcaatgtggttagagggtaatcaattttattgatgctcataaaaagtgaacttttaaaaaatatctttttattgtctgttttcactctcactgatttttttatgttatctccattatttcttactttttgcttcttttggatttattttgctttgtgttttctaatttcataaggtagaagcttaggtgatgaatttgagttctgtcttcttttttaataaaacaatttcatgcagcaaaattttctttaagtacaaaccaatacatttcagtatgtccctttttcttttattcaattaataataaatagtaaagtctattttgatttccagtgcaattcagtaatagcatagtaacatattttggatacttttaattatttttaacttgttaaggtttgttttaaggcctggaatatggtatactctttaaatgttttaaattaattgatgcattttgctgttgttagtttggagtgttctctagttttccactttgtcattttggtttatggtgtttttaaggtatactacatagtttttgatattctacttattttttaaaatactaagaacagaatattgaagtttctaacaatagttatatattcgattacttgtcttttaattttgttttatattttttggtcagttattaggtgcatatacatttatgattgtatttattcagtaaaataatctctttattattatgttatttttctttattatctttgatattctgaagtataatttttctgatatcaacatatcttttgattactatttgccttgctcatcttttaaattaaacacataaatggtcttatttttaagtacgacttatctgtctttcaatggatgtggttagacaatttaaatttattgtagttttcgatattattggataaaaatctatgatttggctatccattttctatttactttatttaatttttgtcctcttgtctgcatactttggattgaatatttttaagcttattatgttaattattgaagtattatttatatgtcctttaaagttaggtattgtcctagattttataatatctatctgaatgttcagtgtttgacaacatattcgcatttcagtttttcagactcttgtggtatttttacatacatatttgatgtaataaatgctaaagtctcacataagattgctactaattttggctttacactgttgatatagtctacagcaaactaaaaagtttcagtaatgtattttgtcttaactttttattacatataatagataacttttaaagttattttgatcatatatttttacttatcataatttgatattttcaacatttttcattcaaaatatactttaaaatatatggtctaaaatttcatttatttgttgttttttcaattctattttttaagataggatttttttttctctattattcaagctggagctcagtggcatgatctcacgtcactgcagtctcaacttcccaagttcaagcaatcctcctgcctcagccttctgagtagctgggactacaggcgtaccctaccatgccaggctagtttttgtatttatttgtagagacagggttttgttatgcttcccaagctagtctccaactccagttctctagtaatccactcaccttggcttcccaaagtgctgagattacaggcacaagccaccatgcctggccccaatgttacatttattaatgtagtctagaagcaaaacttttaatcctaaaatattatttttctctgatacattgacaggtattgtataatttgttgtttcaaaattctgtgatgtccaatttaaatggttcacagatgtgttaaattaagctttgaaaaatacatttatttggatttaaaattatcttcatgttattttccatgatttattatattaaatatttattaatatttccaggattatacaagctaattatgtttaattaattagtgttttcatctttaaaagcctaaaattagtattttttgatttccagtaatcaatacggaaaatgaaaataaaaatactaatccttcaaatggataattattagactgtatgactgatttacatttcctcataaaggaataatggtttattttattaattttttttacattagcctaaagtcttattgttgtccattgtaaaagatttcacagataacataatagttattgcaggaaatatttaggttaaatgagtgagtggaaacttgcagaagaaacaggtcactcacaggtgactcagttctgcatggctgaggaagcctcaggaaacttacaattatggtggaaggggaaagggaaacaatgcaccttcttcacaagccagcaggaaggagaagagaaagcagggaaaatgccagatgcttataaaaccatccaatcttgtgagactcactcattgtcatgagaacagcattggggaaaccaccccatgattcagttacctccacctggtcccaatcttgacatgtggggattatgaggaatacaattcaaggtgagatttgagtggggacacagagccaagccatatcacttatataggtggaatcatgaagtatttatcctactgtgttaccttatttcacttagcataatggacgttattgatactatcaagtatggcagaatttcattccttttaaaggctaaatagctttccattgtaaacatatatcacattttctacacccatttgcatgtcaatgggtgtttgttttcatattttgactactgtgaatactgctgcaatagacatgagagtgcagatgtctctttgaaatcctgatttttttttttattatactttaagttctgggacacaagttctgggacacaggtgcaaaacgtgcaggtttgttgtataggtatacatgtgccatggtggtttgcagcacccaccaacctgtcatctaggttttaagccccacatgcattagatgttcctcctaatgctatccttccccttactcccaacccccaacaggccccagtgtgtgatgtttccctccctgtgtccatgtgttctcactgttcaactcccacttataagtgagaacatgcagtgtttggttttctgttcctgggttagtttgctgagaatgatggtttctagcttcatccatgtccctgcaaaggatatgaactcattctctttttatggctgcatagtatttcatggtgtatatgtgccacattttctttatagtctatcattgatgggcatttgggttggttccaagtctttgctattgtaaatagtgctgtaatagacatatacgtgtgcatgtatatttatagtagaatgatttataatcatttggttatatacccagtaatgggattgttgggtcaaatggtatttctggttctagatccttgaggaatcagagatcctgattttaattcttttggatctaggctctgaagtgggattgatgaatcaaatggaaattttattttaatttttttagttactttcatactgttttacataatggttgcaccattttacatttccaccagtagcatacaagtttccctttctccacatccttgtcaacatttgctatcctttaacaaaaaaaaagccattataacaggggtgaaattttcatgtccctgaaaattaataataatgagcacattttcttacacctgttggtcatttgtatgtcttctttgggtaaagattcatccaggtctttttccttttttatatcaaattgtttcttacttactattgagttgtaggatctttttatatattttggatattaaccccttaccaaatgtatgatttgcaaatattcctcccattccatattttaccttttcactcttttgatggttttcttgcctgagtagaaagtgtttttagtttgttttagtcccagttgtccttgaaatcggaattacattataattataattcttgagatagaagaatgcatttttgcttctgttgcttgtccctttggtgtaatatccaataaatcatctaaaactttaacaattacaggtcttatctttaattctttaatacattttgagttgatttttgtgtatggtgtaagataagattacaatttcattctcttctatgtgaatatccagtatcaacttttaagacaccaacaatttctccattgtgtatttttagcacccttgctaaaattatttgaccaagtatatgtgggtttatttctgtgctattttgtttaattggcttatttttctgatttcaaggccagtacaatactgttttaattgttgtaactttataatataatttaataagaaaatgtgatgccttcagctttgttcttctttcttaagattgcttgggctattcttggtcttttgcagtttcacataaattttggaacttctttctctttctatattaaaaaatcaagattttggtagagattacactgggactttagatcactttaggtagtatggacattttaacagtaataaggctttcaactcatgaacatgagaaaacttattcatcaaaaatgaagagataaggactttccaaataaaataaaaaagaattaatcctcactagatatgccttacatctgattttgcagggtacagtctctacagttgctttcatgggctagcactgagtgccttccaagctgtcgatgaatgcaaaggagaaatgtggggttgcagcccccacacagggtccccactgaagcactgactagtggaattgtgggaattgggccacagtcctccagaccccacccagaaagatggattcatcgacagcttggaaggcactcagtgctagcccatgaaagcaactgtagagactgtaccctgcaaaatcagatgtaaggcatatctagtgaggattaattcttttttattttatttggaaagtccttatctcttcatttttgatgaataagttttctcatgttcatgagttgaaagccttattactgttaaaatgtccatactacctaaagtgatctaaagtcccagtgtaatctctaccaaaatcttgattttttaatatagaaagagaaagaagttccaaaatttatatgaaactgcaaaagaccaagaatagcccaagcaatcttaagaaagaagaacaaagctgaaggcatcacattttcttattaaattatattataaagttacaacaattaaaacagtattgtactggccttgaaatcagaaaaataagccaattaaacaaaatagcacagaaataaacccacatatacttggtcaaataatttttgtcctagctgaggttctccatgaggcctccagccctgcagcagacttctgggtggacatccaggcattttcatatatcctcttaaagccaggcagaggttcccaaagctcaattcttgtctattgtgcacccacaggaccaacagcatgtggaagccaccaaatcttggggcttgcactctctacagcaatggccagagctgtatcttggcaacttttagccatgctggagccagagtggctgggatgcaggggcaccatgtccaaagattgcacagagcagcaggaccctaagcctctgacaagctctggaagcattttccccattgtctgggctgttaacattcagctccttgtgacttatggaaatttctgcagctggcttgaatttattcccagaaaatgggttttccctttctacctcatggtcaggctgcaaattttccaaatttttatgctctgcttcccttttaaacataagttccaatttaaaataatctttttgtgaacacatataactgtatgctttcaggaaaagccaaatcacctcttaaatgcttttctgcttagaatttattttaccagataccctaagccatatctctcaagttcaaagttctacagctctctagggtaggggcaaaatgccaccagtctctttgctaaagcatagcaagggtgacctttgctccagttcccaataagttcctcacctcaatctgagactgtgggggttcagtcagaatggtgggagaagttgtaaaatagtcacaaaccttccaggaaggccggggttttgcatagcttcagtaaaagatactgctgaagcagcctaatcctctttgagctaatagcaagggtaaataacaaaggaattcaagggagtttatctaaatagcttgtttactcatgtggtcctaagaccaacctttgatttcccaccggtgcataattgctctctactggggcgcgggaggaggggggtgtcggcaatgtcaattaccctctagtggtgtttactcaagacttttgtcacttacatactgaataaatgtgagcttcgctggctgatcagggccacagctgcaactctttacagcaccctccctggtgtctgtgagtggtccagacacttagctggactgtcaggcaaaatatctgtgtcagtgtacattattcatctgtcgttgggtcaggatctgcgggtcagtctcccacatgagactgcctcagtctcgacttcattgtccatatcactatcagcattttagtcaaaaccacgtaacaagtctctagtaagttccaaacttttccttattttgttgtcttctgagtcctccaaactgttccatcatttgctggttacccagttccaaagtggctttcacattctcaggtatcttatagcaatatcccactaccttggtatcaattctctatattagttcattctcacactactataaagaatacctgagactgggtaatttagaagaaaaaaggagatttaattgactcacagttctgcatggctggggaggcctctggaaacttacagtcatggcagaaggcaaagggaaagcaaggcatgtcttaaatggcagcacgaggaagacagagagcatgcctgaaggtggaaaatccccacatttgtcaaacaacaagatctcataagaactctagcatgagaacgacaactgataccagggaaataacaaataataataagaaacttttttgaataattatatgccaacaaattggaaaacctacaataattggatgagttcctaggaaacatacaacatatcaagactgaatcacaaagaaaatcataaagatagataagatagatcataaaagagtaagaaaaaataatcagcaagaaaaaccttttcaacaaaggaaatttcaggactatatggcttcactgtggattctaccaaacattcaaataacaattaataccgatcttcttcactcctctaaaaataaagaagaggaaatacttccaaattcatcttacaagggttgcattttcttgataccaaagccagaaaatacactgcaagagatgggaattaaaagaccatcttcctgataaacgtagtttcaatatcctcaataaaatacaggcaaattgaagtcaacagcatgttgaaagcaccattcaccatgatcaagtggcaaatttggttcaacatatacaaatcaattatgttatatatcacattacagaatgaagaataaaatcacttgatcatctcaatagacaaagaaagaagcattagacaaaattcaccactatttcataattaaaacactcaacaaactaaatataggaggaattgtattttttaaatttgttcttgtttatggcaagtacagtagactttattttgtaatctgttttctttctttttttctgtgtacctacagggttttttatcttcccttaatgtcctgggagtttactactttcttcttatttagacttggtgattgttttagtgtacagaatactacttaaacttcatttttatctactttcttccttaaattccttacagctcaaatttggtcatgacttggaaggagaaaattattagaaaaagatatgaaaccatgccatcaagggatagggccactggcattattttaatccaatggtagtgagaaacaccatagccaactttatgaataaccttttaagatttctttcacatgagtgaacattgtcaatattattattctgccatcctttgtcttccttgttttaatttcctatgtttctagtaagagccttaatgcagaaattattgcattaaatagtaagattaatagcataaccaaaatagtgtactatgtgtcattgtttttcaaataaaattcctagataaaaaagcaaagtcaccgaactcacgattgtgtgaaaatctcagaatgaattatgaaaaaaatcacctaattaatagaagactattaggtaagcagcataacagaattgacaccgtttagtttgtggagtataactggtaatcaatcattactttatttttatcaagtcataacccataagtaatatctggtttctttcttcatttttatctgttaataattaatacaaattccagctacatttacgttgaaagttagttaatgtgtgttagaattacatacttagttaattattattacatatatatgacattcacaatgtaaaagatgctgtgtatacttagaaatctcatataaatataatcaaattgcctctatgatatatactcactatctagagcacacatatcaaatatgaccaaaaagcccagcaggtttggaatatacttttggaagcccatggactcaaaaccacattaattataatattatgacattatttgctctttctagtcttttcctcatgagcatacagtgaatattttcaaaggctttatagacatgtggtatcacaatagattacataaaaaagcagatatgataatccccatcttttcttgaatttggacattacattaatttgtaaaaatgtaaaacaatataatcatttacattttattttgttttgaaaatatagctatttttataaaattgtgcaatttttgttaacatgcaatgaatttatttctgctattttaaataataaatagttcttgaatttcacagttttaatttataatatagtatatattgatatttataactcaaatttcaaaaaaaatttggagaagccgaaaattttttatatataaaatctgtatatctataaatcctgagaaaataaaattgctgaactggagaataacatatgcaattataaattaatttattcaaaaaatttttacctgcaatgattattctaatatgtcacagacaaacaaatatgcacaaactgagagacattttacttattggagtttctcacgtagttgggtaagaaaagttatagctagataaggaggaacagtgttcaagtcaagaaagagttgctacatcttctgaaaaaaattctatgaattagaaagagaacattgttttaagataatttttaacattaaggtttaagaaattcatttaatctaaaagtagagaatttaaatgaaaatgagtttgagatattgttaaaatctctataaaaattacataaacatgggctgggtgcagtggcttacgcctgtaatcccagcactttgggaggccaaggcgggtggatcagctgacttcaggagttcaagaccagcctggccaacatagtgaaaccccatctctactaaaaatacaagagattagctgagtgtggtggtgggtgcctgtaatcccagctactcaagaggctgaggcaggagaatcacttgaacctgggaggcggaggttgcagtgagttatgatctcaccattgtactccagccagggcaacaagagcaaaactgtctccaacaaaataaagaaataaaaaaagacataaacatttggctgaaagttttctaaaggtagactgaaaataaaaagaaagctattaaaatattattttctgatggctaaatatggtgtctgtcagattttgacaatttaacaaaatagacaagagttcatttggagacaatttacataacgggtcaaataaacagtctgcagagcagctgacacttcttattaaggtcattcagttaattagtgaaaaacaaccaagaattagattctcataaggctcagtccatattttattctataacaatgcaatgtcttaacattccgttatcacatttggtttgccatgaatcttgccaattgtaaataatattcttgaagaatttacatatttagaatatgtaattctgaaattatgcattaattgtaagagaaatgacactgaggatataataaaatgtatagcagagaaacagattgaaatttggaagttattagaatattggataaattaatcgtaaaggctgtcagtaactcacttatataatcattcaaagtaatacatacatctatttattaacaagaaagttgaaaagatatttaataatattagtggagcttaggtggcttataactgtaagctatgaatttcaggttttagttccagcatgtaaatagcatggaaatcacagttttcaagggttataagaaagtccttacaacaaataaaagcagaacaaactaaaattaaggattttactaagactcttcagggaatagaggtcacagggcaaacaaccactccaaattgcagaaaatgggtaaatccagagaatcacagcccaaaattgcttcccaggaatagaaatcataagctgtgaacaggtaggaacagttaaatgggaattttgttgggttattggaacttgagaggacaattgattaagataaatactgtcctgagggttgtatttttagacaaccccaacagttttgtggaatttcgactccagaggcctcatcaagttttccttgtgaagatttaataaaaattcctctgcagctctggcatgaagcagggaagagtaatacttctgagtattgtccagcaccttctctatggcaaatttcatctgccagaggcaggactttactagagccttgtcccagaaattaggcattttcattttattccagttccttctagttttgctgtatgcctgaagaaaagaaaagcaaaaagttatattagaagaaacactggtgaatgtcacaagccaaggacacaggcccattaaagatagattttgttgaaaaatttctcccacactttaccagcatatcaacagggttacaatataatagtacatatggcaaattacacctgaaaaaccttgagacaaaaactttctttgaggaaacctactaaggaaagctggaagtggagagtaaagacaagaacaaggacactggggaaatttgaagccactggcacctatagctagtacaggtactaacaaaggtcaaattttaatcatattaatgcaaacctttaactggacagctatttattcagttcttattacccagtgaatgaattctggatttcaacagcaacaacaataacaacaaaatagaagacacaccaaaaggcaaaataaaacaaaatagtctgaagaagtcaatcatcaaaacatgactcagatataaaaccaatgtttgctttatcaagtagaaagtttaacatagttatgactaatatcttaattattattaaaagaagagaacatgaaaacaggttgacaatgcaagaagagatagagagactaagaaatactttaaaggaaatgctagaaatcaaaaacattttatgtatcaacaactactttaactaagctagagcacctagttgtttggtcaaacattaatctagatgcggctttgaaggtattttgtagatgtgattaacatctacaatcagttgacttttttatttagaagattattcttgatattgttgggagagactgggcttatctcatcagttgaaggccttatgagcaaaaactggattcctggcaggggggaaaaaatctgtcctcaagactgtaccatggaaatcctgcctgaatttcttgcctgttttctgccttgttaatttgtcactcaaaactgcaatatcaactccagtctaaatttcctgcctgctgcctgccctgtagataacagacattccagtcctcacaattgcatcagtcaattacttaaaataaatcacaagtatctttcaaaatagatagactagataggtaggtaggtaggtaggtaagtaggtaggtcagtcgatcccagatcttattagtctgttttttgggaagatcctgaagagatttacttccagaactaaatgtaaagagaaatgttaatagaaaaaatagagcttctacgatttaaacggtaatttcaaaatgtaaaaagtatgcatttttaaggtaccagaaatagatgaaagggagaatggacaaaaagaaatatttgaagcaataatggctgaaaactttccagaagtggtggcagacaacacagcacagatccttgaagtgcaaagaataccatgccaattaaacaccaaaataacaacgataataactaaaaaaaaaaaaaaacttcaaaactaggcatattatatttcaattgtagcaaatcaaaaacaaagagagatgttgaaccaagccagtgtatgtttgtgagtaagagtgaagcacctaagattttcttcttttttttttttttggcttgataggaacaagaataagaattagagtagagtattttgtgagaaattccaccaactagaattatctattcagagaaattgtccttcaaaagtgaaggagaataaagacatactcagacaagtaaaatattgagaaaatttattcctagtatctattcctcaagaaatgtgaaatatttccttttggcaagagaaaaatatcacaggttagagacatatctacataatgaaaggaaacgcatcaaagaaggaataaggaaaatatattttcttattcttaatttatctaaaataatggatcatttaaagtaataccagtaacaatataatggttgattgtagaataaatataaatgaaaaataatgtcaacaactttataagacatgggaaggaggaattaagattatagtgtgataagttatgtgtattatacataaagtggtatggtgctttttgaaggttgattgtaatgcaattgtaaactataagccaagtacttataacattttagaaagatgcctaattactgtgcaaaatgagaaaataaaatgggaatataaaatgctcaattaattatagagaagacagaaaagtaggagaaatttatattaaattataattttataataaattataattttatataatttaagtaataaattataaatttaacaaatagaaagaatactgtatattaatccaactgtatcgatcatcactttaaatatcaatggcctaaacgtaccattttaaagacagagattgtcagagtgaataaaataagaagacttaactttatgttagacaaattaaattcactttaaatatagagaatcttatagatttgaagtaaagaactggagaaaaatatgtcatgctgatgttaataaaagaaaaccatacagacaaagccaacttaataacaagaaaacttattaaggataaagagggacattgtataaataaaacaatgaccaactctgcaagtcaaaaataatcctaattttctaagcatttagcaaagaagatgaatatgaatgtggacaaaaaaactgatagaactccaggtagaaacacacgaaatccactattattgatgtcttaaatatactttcataattgatagtaaggaaataaatatcagtaaatatatagttgatctgaacaacactatcaaccaatgtaatttagtaggcatttatggaacactaaatcactggataaattgaaaactaagaaggaatattaatagaataaaatataatggattagaatagcatagggtaagacaaatcattcataaagattttaaaataatttatgtaggcactcttccataaaagaaagtggaactaacctctccacttctcaattttgacatgaaaatagcgagttcgttccaaaaagtacaatataaatgagtcaagagtgggtgcactttacatcagaaaaatctggcaaatgcaatctcagctaagtgatcaaagtcaatattaattcatactgagattctccagtgggcaacaatactcacatcttgatactgacttgaacattaaatctcgtaagttaacaacttccttattaataaatttaataaaatgatatggtagtatcttttctgacaacaatggtacaaaactagaactcaataacaggagatatcttaaatattcataattatgtgggaattaaacaatatgctcctgaaaaatcaatgggtcaaataataaatcaaaaagaaaatctaaaaatatcttcagacagaaaagagtgaagacacaacatatgacaacctaagaggctcagtaaaagttgttttaagaagaaagttaatagcaataaatacctacattaaaaatgaagaaagatcccaactaaactgtctaacattataacttaagaaacagaaaaaaacaaacaaatcccaaattttgcagataaaagaaaatagtaaaaatagaaatgtaaataagtcaaattgagaccaaaaaaaccatagaaggagtcaatataactgagtttaataaaataaacaagattagccagcccttagatggcctaaaaaaaagagagataaacgacttaaataaataccaaaaatgaaagtgaagaaattacaaaagacacatcagaaataaaaaaaatcagagaactattatgaatgattataagctgatattttgtatcatctaaagaaaacagataaatttctagaaaaatacattttaccagatttaagtcaggaatacatagaaagcctcaacagaccaatagcaaataaataaattgaagaagtaattaaaaacctccaaaaaaagaaaatccctagaccagatgccttcacagctgaattcaaagaaaaattgatacccatgcttttttaacacttcaaagaaatagatctatgggaataactttcaaacacattttatgaggccagcatcaccttgatagccaagccagataacaatactgcaaaaaacaaacaaaacaaacaaacaaacaaaaatctacaggtcagtttgtctgataatcactgatgaaaaagccccaataaattattagaaaacttaatcaaagagtatgtcaaaaagattatattgtaaccaagtgggatttatccctagcctgcaaggttggtttaacatgtgcaaagcaatcaaagtgatgcatcatattaacaaaatcaaaagtaaaagccagataattcatctcgattgacatagaaaaagcaattaacaaattccaacgttttcttgtgataaaaactctcaaaacttaggtataaaacagttcctcaacatagtaaagatcatttataaaaaatcagtagctaacaccataatcaatgaagaataactgaaagctttttcactatgaactggtacaaagcaagtatgaccactctagccacttctgtctagtactgaaagtactctgcttctggaagtgagagcaagagcattcaggtgagaaaagaataaaagacatctaaatcagtatggaagaagtaaaatgatctctatttgcagatgacataatcctataaataaaaaattacaggccgggcacggtggctcacgcctgtaatcctagcactttgggaggccgagacgggcggatcacgaggtcaggagatcgagaccatcttggctaacacggtgaaaccccgtttctactaaaaatacaaaaaattagccgggcgtgttggcgggcgcctgtagtcccagctacttgggaggctgaggcaggagaatggcgtgaacctgggaggcggagcttgcagtgagccgagatcgcgccactgcactccaacctgggagacacagagagactccgtctcaaaaaaaaaaaaaaaaaaaaaaaaaaaaaaaattacaaatattctacaaaaacactgctaaaactaataaatgaagtaaagttgcaaaagaaaacaccagcatacaaaaatcagcagcatttttatactcaaataacaatctaactaaaaaaggaatgaatagaataatttcatttacaataatataaaaaatacctaggaataagtttatccaataggtgaacaatctgaggtgaacaatttgtacaactgcaaagtataaaacataaatgaaataaattgaataaggcacaaataagtggaaagatattccatgctcatgaattagaagcattaatatgggtaaaatgttcacactactgaaggaaatatacatattcaatggaatacctatcaaattccaaatggtattcttcacagaaataggaaaagaaaatcataaaatttgtatggcacctaaaaatacctcaaagtgtcaaaacaattctgaagaataaaaacaaagttagagacattgcaccccctaagttaaaattatattacaaatctatagtaatcaaaataatatgctatcggcataaaacagacacataggcaagtggaacagagtaaagagcccagaaataaatctaaacatagatggtcaactaattttcaacaggagcaccaagatggctaaaagtagaaaggatagcctctttaataaataatgctaagaaaactggatttcaacatgcaaaaggctaaaattttacactttatcttaacaccaaacacaataatcagctcagaatggttacagacttaaatataagatgagaaacaataaagttagaagaggacgtagagaaaaagctcctgggcgtcgtccctggcaatgatattgtgaatatcacacaaaagctcaggccacaaaaggaacaataaatacatagaactacatcagactgacaaggttctacatggcaaggaaaacaatcaacaagatgaaatggcctaaggtttgggacaaaatatttgtgaaccatgtttctgataacgggttactattcaaaatgtataaagaactcataaaactcaattggaaaaaaaattggtttaaaaatagggaaaagatccgaatagatacttctctgaaaaagaaataaaaacggtcaatagatattcattggagaaatggagattgatatagctattatggaaaatagtatagaggtttctaaataaagtataatggaactattgtattactcgataattcctcttctgggcatctatactcccccaaatgatgccaccaccttataaagatatcggcaccaccgtgttgataggattatctggattttgtaactagaaatgtttacttaaaaccccagaaacatcttattagataataagtttagaccactttctttttctttttctttctcttttttttttttttctttgagacagagtcttacaccgtcacctgggctggagtgcaatggcacgatctctgcctactgcaaccccgcctcccaggttcacgcgattctcctgcctcagcctcccgaggagctgggattacaggtgcacaccactacacccagataatttttttctatttttagtagagacggggtctcactatgttggccagactgaagtttagaccactttctgcagaggaaaagcagtaattattctaaggttgtttgtgtgtgtgtgtgtgtgtgtgtgtgtgtgtgtgtgtgtgtgtaattttattattttttagaatagatcattgtaaaattgggaagatatagtcaaatcaatatgtttagacttttctgagaaccattctagctacactaattgtaaccacagatgttggttattgatggaagagaaatccagctggcccatggagtagtaagtcacatagagtcatgaaacataactgaaggatgtttacatctaataggaaaaaaaattaagagaaaaataatttgccatactttgatcattttaatagaaattattacaaagaatattgaattataaaagaaatataccataggtataaaattaattatattttagtgctaataatgagaattttcctagtttatttcatttcatattagtctaatattattttaatgtcattttaaaggacttttcagttctttaagtttttccttattttaatgaattaatattttaaatttttatagtggaccaatgacatctcaggcttgtaatataataacttagggaaatatggttttctgttataatctaaaaataaaccatggtcagtaatcaattttcttgattccattaaatcataagtgtattgaggtcaagagtacaaggtggaaattgtcagcctattaattcattaaatatttagttcagcttttagaaacatatttaaatatctattacacaccttcctagcattacttgtctcacttttttcttttttatggttattttgaattacaaatgtttatgtgtcaaaactaaacattttttaaaactatgtaaatacatacatttgtatttatactatatattgcattgtctcctcctctgaaagaccaatgatatcagacatttcaaatagaaaacctaaacagcataattaggtagaataatcccctttatgtgatttcttctacagaatcgctcatgcataatcaggaaatgttactttctgaagtaaatgttggttccagtgtacagctccactgcattttcattggcaacctctctctgcatgattctaaaagatggatcgcttaaatatgacgttatagagggttcattttcttctacttccaactacgatgattacatgtagagttattctattctcacttttaaagaaaactcaataaataaaaaaaattaaagcttttagctctggagagaaagcaatctatcctccaatgtgaaataataggaaataagtcatttttatcatttatgtaacattcctgttaatattaatatcccgcctttaattggttcctctggacattcaatcaactcaacatattcaattttactgagaacacaactgtgaatatactcaaaagtttcaaaaagtataactgttaaaagtgcagacaggaaattatggtcattaaatctcacacagcttcagctacttttgaaagtattttgacattctgcaaatatattaaaaaaccattgacataaaaattgtatgttaagttaaactgtattattattattgtttagaaaaatattcatctttgacagggaatagtttcaaaagaaacctgctgatatgatttaggatacttgtaagtatatgtgtgcagtatcatttacctggttttttgggaaaatatttatccaaaaattttatcttgaattctttaaaaatatcatgaccttttaaaattcagaacaaaatattttattgtcacctttattgtttgaccaaatgtattgcacattcagaatagcattttctgtgaaacattctccattagaataaataccagaaattcaattaataagtacgtcaacacagttatactaatataatcagatagcataataaaccacctttacaacattctctacaatattctacaatattctctagctccattatataagtttttttaaaatatatgttttcgcctcatatattgacaacttagattaccctaggtgatagttaatattgtcagcttgattggattgaaggacgcaaagtattattcctggtgtgtctgtgataatgttgccaaaggagattaacatttgagtcagtgcactgggagaggcagacccagcctcagtctaggtgggcgccatctagtcagctgccagcaaggctagggtaaaagcagacagacgaacgtggaaaaactagactggctgagtattccggccttcatctttctcccatgctgggtgcttcctgctctcaaacattggactccaagttcttcacctttggaatcttggacttacaccagtggtttaccaagggctctcaggcctttggccacagactgaaggctgcactgttaacatccctactcttgaggtttggggactcagactggcttccttgctcctcagcttgcagatggcctatggtgggacttcaccttgtgatcgtgagagtcaacactccttaataaattccctttcatatataaatctatcctattaatcctgtccctctagagaaccctaactaatacagatgttggtagcggtagagtggggtactgctataaggataccccaaaatgtggaagcgactttggaactaggtaacagacagaggttggaacagtttggagggctcagaagaatacagaaaaatatgggaaagtttggaacttcctagagacttattgaatggttttgaccaaaatgctaatagtgatattgacaagaaagttcaggctaaggtggtctcagaaggagatgagaaacttcttgggaactagagcaaagatcattcttgttattctttagaaaaagagactggcagcattttgccccagctctggagatctgtggaactttggactggagagagatggtttggaattgacacttatgttttctgatgctacaataaaataatgttttgtctacttatattctagcctactaatacaacatgagtattgcatggtcagaaaatagccagatgtggtggcatgtgcaggtaatcccatcatgtcagcctctggattatctggaattatataggcacatacccacacaactggctattttaaaacttctaatttatttatttatttattttgtagagacacggtctcactatgttgcccaagctgaccttgttcatatttcttcttccagaatatttcatatcctgtagtaagcagtcctcccagtttttgtttaaatgaaatgaagttatgtatttcctacatttaaaaagaaaagtatcttcattgagaacagaattcttacagaatgggagaaagcatttgcaaaatatatatattatatgagacctgtacctagaatacattttaaaatttttgcacctcaatgagaagtcataaaacctcatcaaatcaaggaaatctaaatataaaccctagccagcaattgaatgggaactttatcatatgaaatacatagaggtcaagtaatcatgtaaaaaaactccaatttttggaattaaaaagaaaactcaaagtctaaaaaatagcaaagctaaaaaaatagcaatgtgtcatcattacacaccccatagaatggtaaaagtgtaaaacgatgctctttactaactgccggtgaggacatggaaccattataacattcatacattttgtgtatgattgcataaacactttggatagcaattttacagttacatagaaatttaagcatccacttaccaaatcacctggccattacattcctatatatttactcaagagaaagaaatacatatgttcattcaaagctttggttcattgctgtgttatatgtaaaagctaaaacctggaagcatccaaaaatttttttaccagtgcaatgtaatactactcagcaaagaaacagaatggacgaataaaaacgacgacgataaatctcaaaataattatgtttgtttttattttaaaaaattacaaggaaagcatatccagtacaatttcattatataaaattctagaaaatacaatctaatttataatgacagaaagcagaccagtgcttgccttctcattgcaatgtatgtgtttactaccaacatgtgtcaaaactcatcaatctgttttttaaaaaatgtgcatattattgcaaaaataaaataaattacaaatgcaaggcaataaaatatctcagtagtctttgttaaaagcaagacgctttaaaaaatgtaagtagaaacaagtaggattgccaaataattttgattaaaaaaagtcaaaaagcccatatgattttttgtacttattaactaattattaagattgtgtcataatggctaaagcatagacatatgggtaacagaaatgtaacatataccagaaagtaacatactcataattaatgaattgattgtcaacaaaggtcaagacaattcaataaaaaagaattgatttattttaaaaaagttataaaataatcttatagccataagtaaaaaaatcatctcaatgtacaccttacaattgaatacaatattaactggaatgtatcatagatacagctatacatacaatgaaaactataaaacatctggatgaaaacatgggagaaaatatttttcaacttcaatttggcaactttttaaaatataggacataaaattcacaaaacagaaaagaaaatcaataatttgtacttcacaaaagtaaaaaacttaagaacattgctaaaaataaaagacaaacaacagaaaaaatgtttcgataacatataccggaaaattattttatatatatatataataattttatattatatattatattatacatatataattatatatattttgtatatataattatatattatattatatatataattatatatataatatatatatataattatatatatataatatatatatataattatatatatatattatatacatataatcaggccaggtgcagtggctcacttctgtcatcccagcactttgggaagcaggggtgggctgatcacgaggtcaagagtaccagaccagcctaaccaacattgtgaaaccctgtctctactaaaaatacaaaaaatcagcagggagtggtggcacgtgcctgtaatcccagcaaaaggctgaggcaggagaattgcttgaatccgggaggtggaggttgcagtgagccgagatcataccactgcactccagcctgggtgacagatggagactccgtctcaaaaaaataaaaaaaacaccgcatgttctcactcataagtgggagttgaacaatgagaacacatggacacagagaggggaacaacacaacacacaccagggcctgttgggaggtgggggttggggaggaagggcagggagagcataaggacaaatacctaatgcatatggagcttaaaacctagatgacaggttgatgggtgcagcaaaccaccatgacacgtgtacacctacgtaacaaaccagcatattctgcacatgtaccccagaacttaaagcaaaattaaaaaatgaaaaaataaaaaataaaaaaattgtctctattttcagtaacatcatagtctaagtagaaaattactaggaatcagttaaaatgggcatagtatttgcatgatacatcactagtatataaaaatcagttgctttcccatacatcagaaatcaactattggaatttgaaattaaagggaaaaatcagtgtcattttcaaaatcacacaccaaaatgaagtgattatgtacacatataacacaaatgtatagaacctacatgcagaaaagtgtaaaacactaaagaaaaaaaagaatatgtaaataaatggaaagatattctgtatttgtagattgagcgacttacctattgacaagatgtcagttcttcccaatctaatctgtattgactgcaatatcagtcaaaataccagtaagcaattttgtgagtattgaaaaattgattcttaatgtatataagaaggcaaagacctgtaatatctaacacaatgctaaggaagaaaaccaaacctggaggactcaccatatcaaatttcaatagcatcatattgaccaaagaataggcacatagagtaatggactacatcaaggagaatacaaatagactctcatatagtcaacagatctttgacaaaagagtaaaggcaatttagtgaaaaagaatgatcttttaaacaaattgaaacaattgaacatttaaatgctaaaaatgaacttagatataaacattacaccttttacaaaaattaactcaaaatgactcataggcctaaatgtaaatgtaaatgtaaaatataaaattatagaatttcatgagtaaacataaaatatatatgacctttagtttgaaaatgagctttaattacaacaccaatggcatgatctgtcaaataacaattattgtttgacttttttaaatgtaaaaattctgcactgcaaaagacttttatgagaataaagaaaatgaatgaacagactgacagaaaatatttacaagtgcagatttgaaaacatacttgtatataaagtatttttaaaattgaactcaacaataagaaaaaataatatttaaaatgggcaaaagtctgaacaaacacaccaaaatatatggatttaaaataattaaatgagaagatgctcaggaccatttgttaacagaaaaatgtaaattaaagctacaatgaaataccaccatatatctattagaatcagaatcactaaaacccaaaggctaacgataccaaatgctgacaataatacatgaaacaggaactctgattcatctggaggaaatgcaaaatgatacacttatacgggaacacagcattttcttacaactcaacaattaggctccttgacatttacccaactgagttgattgaatacttaggttgacagaaaacctagacacaggatttttggcaacttatttgtatttgccaaaaatgggaagcaaccaaggtatccattgatatgtgaatggataacaaatcatagtacatccatataatggaatttgatttagtgataaagagagatatgcttcaaatcataaaagacattacaaaacataactccatattgctaagtgagagatgccagtctaaaaaagctgcacagtgccaaattcaattacacgaatttcaggaaaagacaaaactatcgagtcagtaaacacatcagtggttctgtcacaatcaggaggaagatgaatagttgaagcataggagatttcctagagcagaaaaactattcaatatgacattgtaatgatgaattcatgaccacaagcatttgtcaaaacctatagaactttgcagtttaactttaatgaatacacatttttaaaaatttatttaaatgctgggaattttaagatggaatgaagaatgtgacaataatctaaatgtattacaaatgaatgaaataacctcactaaaggggtggaacaataaagtgatgacttaagcaactttggaaatgcatgaactctgtaatactaaagggacccagaagagttgaatagtgctgttttccattgaagtattggttaactattctgaaaccacaaatacatatatactaaaactgaaaaattatgtaaatagatggtgaatgatagagacaaatttcatcattgttgaaatgggaagtcacagaaaacatgttatagaggctaaaatgaattatatgttaatgggttagagttgaagacatcagcataaactctttttagcttaatattgatacagatcgttccacataaaaacatttatagatatgtatatacagcactcccatagaaatgagcacaaccagcatacagatcttcacttctaataccattgactaataaaacgaatgaggaatcattggaacaattgctgaatctagggctggggtagaaaatatacaagacaagatatcaagtttttgtagtgtcagaaagtgacaaaaaattaaaaaaaaaaaaaaaaaccctcacagtgatggagtatgtcaaagggccccaggaataaaaaaaaaaaactcccattgacaaaatatggaacaattataacaggaaatatgtaaaattgtacttagttataacccaaattatagaataattttccatgagtccatactaaaataagtaaatgatggaataaataaataaatggaagagaatagaccaatcatttgagtagacgaattccaaataataaatgtagatactctgctcttatcgaagtggaacatgattcttcactttttaagtgtgggcagtatataatgccttctatgtagggaaggaggaacagagtaacttaacattggagaaacctgccaaacactatctctaccaggagattgaggtcaacatgaaaagtgatacataatatttatggtgcatatgcttgatatgatgtgataagaatggcactttacacctcccaaaaaagacattacttcagtctaatcatgagaaaaaaaattaactaagtgccaattgaaggctgttctgcaaaatacctgaccagtactccttgcaactttaaatatcatacaaaacaaggaaagtctcagaaactgtcacagctgagaggaagctaagaagacctaatagctaaatgtagtatcatattctggatggaatcctgaaacaacaaaaacaaacggacattatgaaaaaacaggaaaaccccagtaaaatatattctgtaatcaaaatatatgaatctcggttcatttttacaaatatactactgtaatataataaattaataggggtaactaagggtagattatacagaaacttcctgtactgtcttctcaataattctgtagatccaaaattgttctaaaataaaatgtagttttaagaaataatttcactatttttattaggagtaaaatgatatgaattagtaagcaaatagattagattattgttgtcagtaactttcctcatttgatcatttaataccaagcaaatattgtttcttcccagcttcctttaaccttggattgtggatttattttctttgtttctattgcttattaaacagtcttgacctctcttcactgaatctaatatatccaccaaatgctgttattcagttcttaatcttagccatcaatttctgtaagagtaagagaatacactaagtgaaaatagatttaatagggatagacaatgattcacagtgttccagagaggccattaagataacaaataatgcatgtctctttgaatatataaaaatgaaattactaaaaaaaaaatctacattagttttggctttgaatataatttaaaccacactgtttgttttactttctctataggctttatatttataacacaacaatttattttaatcaattttgttgcacatttattccaaacaataaatacaacaattggtaatttcatatgattattaatgaaaacatcattaacctttaatacagaagggtaaggcattttttagtatgcatataaaaatttttgaaaaataattctatagctaaataaatcaataagaagattgggagagtggatataataaaagttgataagagatacaagtcatttatggtgtttattgtattatatgtcaatattgaaagaaactcaaacttctttttaagtttacttctttttttcttttttttttaattgaacaatgagagcacatggacacaggaaggggaatatcacacactggggcctgttgtggggtggggggaagggggagggatagcattaggagatatacctaatgctaaatgacgagttaatgagtgcagcacaccgacatggcacatgtatacatgtgtaacaaacctgcacattgtgcacatgtaccctaaaacttaaagtataataataataaaattttaaaaaaaagaaaaaaaattaagtttacttcttttggagcctactacaggtatggtcatgaatgtatatataatttcactaatcccttgaaagaaactacaaaatttaaaatagaactaaaatgatcaactgtaaatagatgaaagcaagtagaaacaaacaggacaaaggtggcagcataggaacgtttgtaaacagtatagtcttaatcaggaggacacggattaggtattagtggactatgtggtaatgaacactcccacgtgcccacatacacacgcgtacacacacttgcagaactgaggcaggaaaatagggtctggaggcagggaacataaggctgatttacacttcagctatgacaggaaatatcctctccatagggcagacaccgagtaaatgactgtaactttactttgtcctctccatttacagcgggcatactcgaagcaaccaatgaaatcctttagggggtattttaaactcctaaaaattccttaatagggcctttgagctcctatgcttgggccctctcccacactgtggagtgtactttcactttcaataaattcctttgtcccttccttgctttgtgcgttttgtccaattctttgttcaagacaccaagaacctcgacacgaaccacctttaacatagtttggtgaaccagcctggaggcagaggtaagcccaaagtttgggatttattcttctcctttcttctttttctttctgctccatacaagggaatctttctcccttttcctttccaacccaggacccttagtagtcagatcctaaacatggaagcaaatgcaggtttctggctgtggccagtaaacctaagggggttccatgtggagaagcctgaccaccaccgcccagttcgcttaagaaacctgggttttttttccacgtcttttttctttttcttttttttcctctttctttttcagtctttcagcagcagcttcctagtagctccttggaaattgagggcaattgcctggggtcactcctcagtactgcttgaaggcctaggaaatgaatgggaataattgccctgccccaaaggggaaaggacttgtattttttaatcttttctgtacatggtccctgatccctacatgggatgcagctccgagcaaacttgcacatgtttcaggggacttaaaccttcttttcttatgctaaattcttcccttattgtattcaactggctaaggaacaaaaaggcccacccagcatccagttctcattacagttcatggccactcttataaagctcattgtatcctccagaggggagaacctgcatgtggtgcccacctgaggtcagagacgtttggcactctaagactggaccccacaggaggatgctctgtggatcctggggaccctaaccactccactcctaacactcttggcagaggatctgaggtctagtattaaacccccttagaattttctctcacagttgcagtgctgcttggccccaacagtgtttggaatctggagtttactttctaatgggaaagtggaatggtgttgcatgtgtccaggcttttgtgctgtgtttctaaccagggcgcttggttaatgtgtgacatcctcctttggtagggtttggtcccagtgctctttgaagtctggggagatttgacctttaaaaatcaaactgtcagccaggcgtggtggctcacgcctgtaatcccagcacttttggaggccgaggtgagaggatcacctaaggtcgggagttcgagaccagcctgaccaacatggagaaaccctgtctctactaaaaaaaaaaaaaaaaaaaaaaaaaaaaaaaaagtacaaaattagccaggcgtggtggcatatgcttgtaatccaagctactcgggaggctgaggcagaagaatagcttgaacctgggaggcagaggttatggtgagctgagattgcgccattgcactccagcccgggcaacaagagtgaaattccgtctcaaaaaaaaaaaaaaaatcaaactgtcatgaagactgctttacccaaaatcttggttcacagccttcattagattatctgttggggcaaagtaatacgggcaagcttgtattgctatctcatgactaaggtgccaagctattgtattttcatttgtgtgtgtgtgtatacacatctatatgtgtttatttgtatgtacgcttattgttatatgtcatgtctaccaaaattggcttataagtaaaagagcactcataaattaagtaaataagtctaagcaatttacaagtttagatgacttaaagtatcactttactaaacaatctagctttacaattattggtggaataaaaatagaaatgccttcagaattgtcagcatacattttgtctgaattttatgtttgtctttgctagatatttttaaatatcagtgttaattcaagggaggagctgcttggggtaagcctgcctcccattctgttcaaaatgactgagataaattcatatctgattgcttcctttggaaaagctaatcagaaactagaaagaatgcaaccatttttctcccacctgtgatctgaaagcccacaagccccctcctcacctcgagctgtcccacctttccagaccaaaccaatgttcattttacctatgttgatggatgtctcatgtcttccttgtaaaaagtaaaaaattaagtacagtgaatagaataattgtttaggtaatgtttttgtgtaaattaaaatcttaaagttgtttttgatgctcatttaatatctgagtcatttccaataaagaaaatgttgtaatatagaaaaatatgtttccaaaaattgtggaattgtccttatctataaatgtccatatctgatagctcaggatttcttgctttttagagtttcagtatagttttagtttactaaggataaaattctagttaacatgtaattctgtataggaaatgtgccagaaagggttgtattattagtggaaaaagaataattttatctaattccaaaattatctaaaagtaagttcaaattacagatttgaaaaggttatttatgaaacagtgtagtaagaaaccattaagtaggggagaaagatatggaaaaactttaaataataaaatattatttaaaacccgataaagaattggaaacatttgtctatcattttcatagttaaagctcttagtcttgaataaagttaaaagtattgtaaaaatgcattggcagtttggcagtttttaaaaaatatagttaagcatggagctggatttagcataaagtcaaatttcacatacattgcattgcttcacactatgtttacagttttgcgtggatagtgctagagtacttattggtcatgtgcctaaagtgaatttctgaatttcacagaatgtataatgatattggtgaacttaaggatattgaattgtgtgtcaggaataaaatattcattatgtgggtttttgggggccctaagtgacgctgtaaccaccagggtaaatagagtaggaaaatttagatttggtttcctccttaattgtttttgcttctagttttcattcatttgctgtttattctcctctggctttgattgactatccatatatataaatcatgatgctttttattttctaatggaaggcttttatttggttttgtgaatagttattttgtttccaatgcatttctagcaagtcatattcattccacttatctggaattcctaagctacctttgtcaggtcacaggattaatggagcacaccagctttttattcttataaactaactttttgaattttaggcttcctggtattttaagtatgctgactatactctcataaatagaatttgagtcatatttctttctctctgcctagtttctccaaaattgtaaactatttataaatattcttaattcatggcaatgtgtttgtttacatacagtcaagcatgatccctaaggctgctcagggagagagaacctagaaacctggcatgctggcaaaagggtaagaatttcttgccagtcagtctctggcctctttctttctgtgcaaactggttacattaaagataaaaatcactgtttgtctcctctgtaaagttttgacttaatttgtttaataataataagagcttaaatcaaatgtttcatcagaaatgtgaaaaacataatgccttttattttgttcatgtgacttgagtaatcgttggcaaataaagacagttttaaagattattggtaaaatacaatgtcttcaaaatgtaaacatgtggtgtaagttatgttcaaacattaggtttgctaaaagctttaagatcataaactgcttctttggtttttgaaaattgtttaacttgcctgcattccagctgggtaaggcctggggacatgtggagctggccactccctagctatgctggaagcagtcaaaccttattagaacataacttaccagatttttacattaaagttaaaattgctaagactcactattataatatgcaattgagactgctagaaacagttttaaatgtaaggtgtgcaaaaacagtagaatgtgattttttatgttgttgtttaaaggttataaaaggtttttgattctttaaaattttggactcatcattttggcaaaagaaataatttatggtaatctagaattccaaaatcaaacttaagcctcaaaattatctttcctaatgcctgagtttctggatggatcagagggcccctgaaaacatccagaaaggaggtaaacaggattatttgacatgtttaggtacgtaggattgccaaaatgatgttcaatcttctttaggctatgtttttgtgaatatattccaaaattgtatgggatttctaaaattctaatgtctaagtgtatgctaccaatcacaattatagttattatgttattgtaaaccacagaaaaaaataaatttccttgtataaaactactaactcaagtagaacaaaattaattaaataccaagaaaatactttgtcagattttcatgttaaaccagttgaaactgaaattgtttaaaatagtttataaccaatgcttggtcccatattcctgggaagacaattaattcaatgcatgctttctggttgtataaaagctttcccacacaggaggactgatgttataacagtagattattatgctacagtatattttcaccaggtaaagaaagctttttatggtttgaatcttctggaaacatcagagtaaaaccatacttgccatccacactacaacaaaactttgggaccttgaactttgggttcataacctcatgactgagaagggtccctctatgctattggagctatgcacccactggaacccttaaggtcaaactaagcagggaaatttctcccaagaagagaataggacccttgatgtgaacagcttcctaagttcacagattaagacttctactatcatgaactcatatctttgaatattttttcttgcttatgccttctaagaacaatagaagtggaaaaagggtctgttatgtgcacttatggggcacacttttatttgttaatgagtttgcagcctgccttatacatgggtaaccttatactttgatagataaaaggtgaaggcccactgttggtaagaaactttaatggtacatgtgttgcctcataatcagtcaaaagcaaaacactggttgactccttttaacccacatcatgggttaaagagaacattgccagaaggccttcactcttctaaaagggcatcatttgttaggtcctttttccatggtttaaagtaaactatgcaatgactagaaatttaatccctcatgacaggctctatggcagattctactgtaaaggctacagttacagaatagactctaaattttcttgtgaaagttatgacaaaattcgctaaacagagaagtatctgtgcagctgctggcacttgtggcctatagagaaatacatcaaatgaagattatagaaattcagtggtagaggagtgatgaagaaattgcttagtcaagtgagtacattctttatctagctcattatttgatccatttgattttaggaggtttgttttatggggatcctgaggaaggagcatattccaaactcttgatattattctcccaatagtcataataatagtctccagggtgcactgtattctctcaaaggtttcaaatgcttgcatgcagccatctctagaatgtgatatggtctctcctcaactggaataacaggagctgaaagaaatgtgcaaccatgaggacaccataacctataaataatgtgctgataccagaaacccaaaatgatggtaactgagagtggttctaaggccctaagttttggtacactctcatctaagtgagaacctgaccaaaaagggggaatttttttttttttttattttctgaggtggagtcttgctctggtgcccaggctgaagtgcagtggcatgatcttggatcactgcaacctctgtctcccgggttcaggtttaagcaattctcctacctcagcctcctgagtagctgggactataggtgcgtgccaccatacccatctaattttttgtatttttagtagagacgggttttcaccatgttagccaggatggtctcaatctcctgaccttgtgatctgcctgctttggcttcccaaagtgctgggattacaggtgtgagccaccgtgcccagccaggcagaatattttaaacaaaattctgggaggccgttgttttggactaagttcatgtactaggtctcaacaaaccaagccaaaccaaaccaaaccaaaatggagttgcttgtgctaggactttaaggaaacacatagattctagaacaaatcaggttttgttctgaatcctgcaaatctctataatacagatttctgacagcataggtatccaccccctaaagtccccattaaatcttttaaccaaattcatttcctctggcctagagaccatcaagcttcagatgatcatgcaacaaaagtcccagctagttccaggtgaagacaacacacctggccttcaaaaagctactctgcctccactagagagaacagggcgagagttccatgatccccagtaggtaaggactacaccccaagccagcatgaagcagttacagaaaaagacgaccattgatccctctgcttcctataaagatttatggatttatggggatcacatctgttggcgggagggtgggaaaaggggcaggaaaatagggtctggaggcaaggaacatataaggctgatttacacttcagctatgagaggaaatatcctctccataggacatacacagagtaaataactttgtaactttacttcatcctctccatttacatagggcataccagaaataaccagtggaatcctctagggggtatttaaactcccaaaaattctgtaacgtggccttggagctcctatgctcaggtccgctcacacactgtggagtgtactttcattttcaataaattcctttgtcccttccttgctttgtttgtgtgttttgtccaattctttgttcaagatgccaagaacctggacaccctcctcctttaacagaatgatttgatttattttacttcacattttgtttatttgtttatttgtacttcacattttgtgctcatttttcctactgcagaggtttttaaaaatactgaagatataattgtccttatttatctctgcatttgttaatccacacatttgtttgaacaaatggtatcttcaaatttgccatgtaccagctatcattctagccacacatgatccctaccttcatggaaatttctaccaataagtgttctagaaaaccttgacattattactgagtcttactggctttgggatacaacaaaatacacttcctagtttgagtgacagtcagaaatggttcctaatatcctaggtgaaatctatccatcagttaactgcttttaaacagatcacactgcccctttatcagatgtagcagctgcctcaaataaagcctgtctattttacattcacatatccatggttcatgtacattcaatagtcacttggagataaggcaatagatcatgtattttaccagttaggtgtgaatcagtagtgcattaattgtaagtatataactggtaaacatacatatcaaaggacaaggatatttggataacgaagggtgagaagtgagatttattatgaatggagcaaacgtaaaattttataattaacgcaaatgtctggtatttccagacattaaaaacacataactatagcaaggtagtttatatctcaatgtcactatttatttattttctctgtgggagtatctataagagaaatatttattatttcctactttaagctaaagaagtggctaaacctaggtgtttgagtacttgggcatagattgaggagatactattaacatttttttgttacataactgaaaattaaacatcctaaatatttggaaaacccctccacaacttcattttacttatgaactcaattgaggactattgtgataaacatttcttatacttaccaaagtttttggtgttcatatttgtcaaggaactgtgctaaaggagagtaattgaccattgtagagtaaagcctaggaaactctaaaattctctacattttttttctttttttacatccataggaaagaaataacatgattgaggttgaatttatcactaccagagaaatggaacttgagccttattacatttggattagaaaaacattggaatatcagttgaatactcagactgtaaagaccatgaatatcacctttagaaaagtgtatctgattttggttagttctgcattttatagctgctcttatatgggtacacttagccttcatctgtggactcaatgtgcactcagtcaaaatagcatatgtggcttaaatactgagtgtaacctaatcatttattccataaatgtctatagtgcattaattttgtgctaggtcttttcaaatcaaaagcatttgggataacatgaacagcaaactcactcttctatgtattactatttggttaacagagtcagtcactgtgaaaagtaaacaattagataaacaagataacaattgctctgataagtgaaattaagtaatagtagagaaagttgataattatccttccttggatagtcagtgaaggccagatggaaaaggcagcatttaaacagatgttagaaagaactgggtatttaagacaaataacttctcaggtaggagaaataagatgaaggctctaaagtcatttaaaatttaagttcaatacaggactagaaagaaagccaatgtgcttggatggcttaacgagctgtgatttagtgaatcataaacaggaaactcggagatgatttcagagatgaagtcttgggtcaagatttggtaggccttgtgaagggaaaatatcttgggcccccaaaatcactaaggaaaactcaaggtggaaactgcttaagaaaaatcctgtctcctattctattcaaagctctccctctgctcactgagatagatgcatatatgattgcctcctttggaaaggctaatcagaaactcaaaacaatgcaaccctttgtgtcttacctatctgtgacctggaagctccttcccgctttgagtcttcctgcctttgcttcaagttgtcccacctttccagaccaaaccaatgtactttttacatatattgattgatgtctcatgtctccctaaaatgtataaaatcaagctgtgccatgaccatcttgggcacatgtcaggatttcctgaggctgtgtcacggacccttccctcaccttgtcaaaataaactttctaaattaactgagatctgtctcagattttctggtttcacaggctcttagataaaaataaaggtttggatttatttttatgagtgcatttgaactcgttgtaatgaatagttttgacgtggtagaaaaaataatactataacattacttttaattgttctctaacttctggttttattcttttttttcttttttttttttatgacagagtctcactctgtgtcacaggctgaagtgcagtggcacaatcttggctcactgcaacctccacctcccgggttcaagtgattctcctgcttcagcctccggagtagctgggactacaggtatgcgccaccatgcccagaaaacttttatgtttttagtagagacggggtttcaccatgttggccagtctggtctcaaactcctgacctcaggtgatctgcccgcctcggcctcccaaagtgctgggattacaggtgtgaaccactgcgcccggccttgttctctaacttccatgtaaacaacatgaaagcaggaagatggttagcaggctgctgcagagcctagatggttgttaatagcagcttgttgaaggacaagtataaaggtaaatgacaagtgaccatgttcagcatgtatttttggtagacagatggaggtattgctgatatattacatggaggaaataagagaaaaaaatgagtaagtgcaatttctcactcagtggtttaacaactgaagaaaggacttctagattctgaaataaaatattatggaagatgcaaaagtttattgaaagaaatagtgttaccatagccatgcatgttaggtcgcagtatggagtatggttgaaattctgagtggagggtgtgtgaatctggtgttcggtgaggtcaggtgataagaatttgagccacatggcatatcatgacacacaaaatcatttcttctgatgctacttctatacattccagtaaatagaggaaacataaagattgaggactaaacctttaggaaatttgcagtcaagattttttaacacaggagaagataatgaagatgatttagaatatatggctacatggccaggcgtggtggctcacgcctataatcctagcactttgggaggccgaggtgggcggatcacgatatcacaagatggaggtcatcttggctaacacggtgaaacccggtctctattaaaaatataaaaaattagccaggagtggtggcacgtgcctgtcccagctactcgggaggctgaggcaggagaattgcttgaacctggaaggtggaggttgcagtgagccaagatcgcgccactgcactccaacctggggaacagagagagactccgtctccaaaaaaataaataaataaaaaataaagatatttggctacataaggagaaataaaaacaacaggctgctaaggtgttctggtattcaaaaaagaaaaccattgaagtaaaaggtgtgctcaatgccactgttagatcaggtaagtggagcacagagaagtgaccattgcaatatgaaagtatttggtgacaatgaccaggacatttattggaatggtgaggaggaaagactgatttattttggcttgataaaataaaaagatgggaaagggaggaaatataagcccttgattatagacaccctgaggtgagtaagtttcagtgtgaaaggaaggagaaatagaagctagaaagtgcatatttccaagatggtgaaaaagtggagaaagaaattggtgatggaagccagccttggagaagcaactagtagataatatcacatgtgaagagtttgaactttagtggcaggtgcatttcattcacaatagcaaaatataagcagagtgtgggtgccgattaaggactttggatagatgcagccataaggagaggagggggaattctacctaggcatgttctgcagattgaaactatgtcacagcttcaatggccgccccccttttcaatactcctggatgaaaatgggttttggaatgtagccggttttcagttccagatgtttctcataaccccaaattatcttcacttgccaatttcctctgtcaaattaatataggttgggtattattctaacggttcactttctttttaaaccatgtaattcaaggacatgaagactctaaaaatgaacagttttttttacttaagtttattgctaaaagtatgatttcaacggataaaatgagaagagagcagccataatagatggtagtgatcattttcttatttaaaaaatcctcttttgagcatagtaaggagctgtgtacattctgaagtatacttgctgaaaaattattacagaagcataataaaatttgtgattttgaacttcactcctttcctttcacaatgtcaaaatgattcatatttctctagaaatgttcaggaggagaatattcacctgtgtaaattatattcctatggggaagggattactgctcttaccgaagagtttatggcagggtttactcttttccattgacagtatgggatgagagaatgggacttagctttgtgtccatttgcattccagtcaccgaaataataatagctatatggcacctagagtagaaaggatgatttacagtaagggcattctctcaaaacttaatagtttccactataaaaactaaagacagttcttcctagtttcactgtttcagagcactgttattagttgactcaaaagtttaaatagcttttgttgtaaaataaacaattggtatatgacattctatgagagggatggtctgagaatggtttattgtgacaatgcaatcactttcaggtattaaatttcaggatgaaaactataaatcattcgctttcccagagtgaagtttgacttattcctgtggccaacatggcttatggacaccaaggacaaataagtcagaataacttgatggaaaagaccttcagcgataactacatagttttcatctcttgtatgaacaaagtgttaaattttctctactatcaattctttagtgatatattggctatgatttttttctgttccatgatatatattattttatcatataatatacattgatatatgaattgattaaggtcagggatttataccaagataataatttgttctaaaaactatatgttcagtttttatcattaaaaacattttaaataataactaattctcatttgtagtcaataagtggcacatgcataatcatatggcaaagatatatttttgtttggtgctgtaggtacaaattacagtttgatctttcatactttatgaaaacaatggtataaatagatatatggttcatattgcagttgaatataatatttattcaataacatttattaatgatatttcaggaagtatttctcatattttaatgtatacatgaaccacatggtatcctcttaaaaaagcaaattttggttcagtttttagaagatggagctaagattttttcatttcaaactgctttgtgatccgctgatctcagtttcagtagcaaatttaaaaatatgtatgcttctggattttaatagataactgaaataaaacaaaatatttttcagtactaagagtggttaaatttcaacatgatctttgcttaaatgaaagagactattagaagtacattttctagtactcttttttatttcttttcattttaaatatatttccaaattacaatactttaatttaatgactcatgctgacttcaaaattaacaccacagctaaaatatatgagctccttttacagcagcgtttttcctctgggaaatagtaacttctcttgccattgttttcattattttcacttcttttcttctgtacaaggatctgacaatacatcctcaactttacttgcttgaaaacagaagcagtggcaaagattagtggtgaaaaccaggagacttaaaaaacacatttaatctctttcattcccttccttccttccttccttccttccttccttccttccttccttccttccttcctctctctcttttttattttttggaaaatactcaactatcatcattcactgccattcaaaacatttttcaatcatgtattgtcacctaaaagatttattcaaaacctaacggtgaatggataaagatgctcaatttgggggctctcaatagacaattcaggaatgccgatgattttgctatgtcagtttggtgctatgaagggaggtaaaatatattgcttaaaattgtatatatatacacattacattatatatacaaaaattacatgtatatatatatacacattacatgtatatattttataattttattaatatatatagttttaattacaattcttacatataatataaacataaattttatgtgatccttttttcttgaattaaaggttatataataaaagctaccacctgcagttctcacagcagtagaattccaaatcagccgctgcaaaatcagcaacagcagctgtaacctggtttttagagaagttgaaatcaattttcacaggtaacttaaagtttatacaaatgcagattgtgttcgccagggtttaacatttgtataatagtcataaagataatagtacgataaagagttattcttactgaatttcaatacacagtctcttcttttctgttatggtcttcaaaggtattatttaagcttaattacatttatgaaaacaaattaataaaaatgtcaaagttgggatttaaagaggtatacacttactaaaataaggtatgtttcttaaacaaaatgtattctattttaatcattaatttaagactttcagttcttcatgaatcagtgacccatcaatagtgtatcttttactgtaagttaatttcaatcctagatttgtatacaattaaagtaacatatttatcttaatcttttaagtttttatatatcatccagaaaaatgagatatctataatagtctttcagttctgtaaacttttctcttttttctttctttaattttttttttactttttatttttggtaacaatggttttacatatttatgtggtagatgtaccattttgatacaagcataaaatgtgtaataataaaatctaggtaattgggatattcattacataaaatatttataatttatgtgtgttgggaacattccaaatctcttcttctagttatttttaaatttacaataaattattattaactgtagtcaccctattgtgctactgaacactagaccttattctattaaccatcccctctttataaccccccgcaaacccactacccttcccaacctctggtaactgtcattctactctctgtctttatgagatcagttttctttagttcccatatataagtgaaaacatgcaacatttatctttctgtgcctggcttatttcactgaacatagtatcctccagttccatccatgttgttataattatcatgatttcattcttttgtgtgactgaataataatccattgtgtatatataccacattttctgtattcattcatttgttgtttgacacagtttgatttcatatcttggctatggcaaatagtgctgcaataaacatgggtgtgccaacatctctctccaatagatgtatttcctttattttgaataaatacccagtagtgagattgctggattatattgtagttctatttttagttttttaaggaacctccttactgctttccatagtgactatactaatttacatcccaccgatagtgtatgagtgttcctccttctccacctccttaccaccatttattttctgtctttttgtatttttgttatcccatttgtccattttggttttcattgcctgtgcttttgaggtcttattcaacaaattttgcccagactaatgtactcaaatattttccctatgttttcttctagtagtttcaggtcttacatttaagtctttaatacatttagatttgtttttgcatatggtaagagagagggtactaatttcattcttctgcatatggttatctagtttttcaagcatcaattattgaaaagactgtccttgctgcagtgtatgtttttggtactttgtcaaaaatgaattgactgtaaatgtgtggattgatttgtaggttatctattatgttctatgtgtctgtttttatggcagtaccatgctgattttaatactatagctttgtagtataatttgaagtcagatactgtgcttcttccagctttgttctctttgttcagaattgttgtaggtattccaggtcgtttgtggttccatatacattttagaatttttttttatttctgtgaagaatttcattagtactttgacacatactgtattgaatctgtagataatgttaggcagtatagacatcttaataatattgatttttctaattcatgattatgaaatatctttccatttttgtgtcttcaatttactcccttgatgttttatagcatttttatcaacaaaaattgtgtatgtttataatatacagcatgatgttttgaaatatgtatatattgtagaatgggtaaatcgagctaactaacatatgtattccctcatatgtatatatatttgtgtgtgtgtgtatggcgagaacacataaaatctattttcaagttatttacatgtgggtggattatcgttgtacattggcttataacttaatttgttgttaagtgacaaaagtggatggatagtatgcttccttttatgtggaagagggaacttggggagcttagggagtgcacacgctggagggactttttattttagcaatgcttcttgcagtacatttataactcacgtatagaaaactttcacaatttttcataagcattttgcaattatgattaagtggatttttcaaagcaatacaaatagaaggccaaggaaggtggcttatgtctataatcccagcactttgggaggccaagatgggctgatcacctgaagtcaggggttcaagaccagcctggccaacgtggtgaaattctgtctctactaaaaatacaaaaattagccagacacggtagcacacatatgtaatccaagctactctggaggctgaggcaggagaattatttgaacctgagagtgccgtgaaccaagatagattgcgccactgcactccagcctggtggcagagcaagactctgcctcaaaaaatatatgtataaaataaaataaaaatagaagtcacatttttttcttttgacaatgtcatagcaaaacatatgtaaggaaactaatatagcaacacatatgtaaggaaactaatatatatgtaaggaaactaatataggaaaacatatgtaaggaaacatatataaggaaactactaatatatactatattagtagtcattcaatctaccataactaatacaaataactgaaaacctacaaacatgagcaaatctcttcatgaattcatagcccaaacaagtttattgtctctcttccatctcagtttaagtccatgaattaccaaaacttttttctcctggtctttgattttagtaatttaatttagttgtaattataattatttaagaaaaggtatcaaagtgaattacaaattatgaaattatatttgacttataaactacaatttgcaaagagtgtataattttgattagtagctggttgtagaactaattggtctggagctctttgaaataaatcactctagcttctccattgtgtgcctttagtgctcacgtataagtactttttacgtatccattgaatcaatgagtggataaatcaataaattatttcccatcaataaattgaagcttgctatatgtttattttgcctaacagtgaccttttaatcttagataaatatttattatgttattaaatttaattttcaacttagtttcaactttgcaataattttcatggtttttaaaatactattttaggaagtataaaattttcatttttcttacatgcaaatgtgctcttttaagcttaagattaaaaaattaaaatcactggacagctaagattctggctaattgagtaaatctactctacactaatttgtaaaacctgtttttgatattagcaactgtttttaaaatatttaatgtttaattattataggtacatgtgatgttttgatataggcatacaatgatataggcatacatcagggtaattggggtatccctcacctaaagcctttatcatttctttgcttttgtttcagtttacttatcactttgagtttaatcactaaacaattttgtcaataatatttaattaggcataataatctatgatggtgatatggttttgctgtgtccccacccaaatctcatcttgaattgtagctcccataattctcatgtgtcatgagagagacctggtgggaagtaattgaatcgtggaggtggtttttgtgtgtgtgtgctgttctcgtgatagtgaataagtggttttataaaggggagttcccctgcacacactctcttccttgccaccatgtaagatgtcccttggctcttccttcatcttccactacgattgtgaggccttcccaggcatgtggaactgagtccattaaatctctttcctttataaattacctagtcttgggtatgtctttattagcagcatgagaacagattaacagatgaatatttttaataaataaaatataatttgaaagtcagatagtttccataatctttgtcaaaaaatttacactgtggtatctcatgagttgacctttacttataagaatataggtgcattacaagtagtttagaaattcagatggactttaaccattaaatttgtttttatgacaagtcatgaaatttgacattaaccaaaaacatggtagaatattgtaagtgaacaattacttgtttcctatgccatgagaggttagtcccttttctgaatataaagacaatacacctagtgtttacaaagcaaaaagttttaagactcttgtatatttgttttaaagattatctgctattcactagtattcacctaacatctctctttacttcatttgctacaggcatttattgcattccatttagtagtttgttgtcccagcattgaagatgttatgctgttaccagaccaggaattagaaatctgttaaccataaaaaaatcaggataatttgatttgacagattcaggaagttcagaatggctattgtacaaggtggtaaataagttgccaactgagaaaaagtataagaagcagcagtgtaatgttctgattcttctatttaaaatgctgggtttaaagttaattttactttcatttataaattttgaagatatatttatttattttaatttttatgggtacattgtaggtgtatatatttatggagtatgtgacatgttttggtacagacatggaatgcataatgattatatcatagagaatgtggtatccatcctctcaagcgtttattctttgtgttacaaacaatctaattacgctcttttagttattttaaaatttatgattgaagtattattgactatagtcaccctattgtgctatcaaataatacgtcttatttattctaactatcattttttgtactcattacccatctctaccattccctcacacaccccttctccccaaaaactacccttcctagcctctggtaaccgtttttctactttctatcaaatgaattgatttttatatatcacaaataagtgagaacatgtgatatttatctttctgtgcctggtttataaaaaagtatttaaacatatatagaaaagccctttaaaaatcagtaattcctgaaattttgctcaaagtcaatttaattttcttacatgggatattttctaattcatatcttcactatgacttaaagttcattttcaagctaatatatatttttacagctgtttaccagagagaaacccaaattttctatacccctaaattagttagtttgtgcactcttatctccttaaagtgatcatataatgggggaataaaagtgaaaccatttggaagtatctttatagtgcccaaaggagaaattgaaataacaaatgattattagagtgttcatttcatggaggtatgaacatttgaaaagattaagtatgagtacttaagtgtgtgttaagtgtttctgcgaattaatgatagcgcagttgaaagctgaaactaaaaatttttcttttttttctgcaaaattatgtgattcacaactacaaaaaagcttttagtttaaacaacatattctgaaattattttatatatattaggtttgtaatttcaatacatcatttcagtttaataatttttcttgctaattctgtgagaaacattaactccttatataaaaaatgaaaccaaaatatataccaaataggaattgaacttctcctttttataaacctgtaattaaatttcagaaaaagttaactttttatatgcaatttgagtccataaaaatggttgtacaggataattgcatagcttcatgttctcaaccatactaaacagaagaaaacatacagggcatgttacacgggtgtaaattaaatctatttttatgttttgaagcccagcaattttcttaatgctatttgaccaaagcctaatgtgtaaaccgtactaatattttagagggcgaaaaaatcagcttcaggtgctagtctagaatttatgccggtaatagaaattattttctgcattattgagcagtaattaccttgcttcacatattgccacaatattttaaagttttactttcatatgaaatgccttctagctaccatgagagctagaagtatgcagaattgcctagtatattgcatttgttaagaaaacagaagcctatcactacattaatctagaattagatgattctacatagataatttctgtgctggagatatgaaggtacagatatatttgcatatctatggaattgtgaggaaagcatgccatatggttttgattcctcatctaaaaatgtgaataatcagtgaaattacattttaacatggctgattattgttagtgcctgcgtggtacttaaattttcaacttaattttaaaaatatatcacatttaattcactgaaaataaaatatattaagtaatattattaaatattttgtgctttttactagaatgcatcttgattatctataaacattgcttgatagaaactgagatatatgtattattttatatacataaacagacatatttgtccctcttcccccgtctctcttttcctctgtcactttttttctctatatgtatatgtaagatatttttacaaattgaacatgagtggaagaaatgaaaaaaatcaagaattgcttttaattgacttacttgagtaattgtgtagacgacttagagatattaaaatttaggagaaaaatagtttagaagagactcgtgttcattttatgttaaaacattgaggtatcattataacatcccttcctcatttttaaaattaggttatttgttttttgttgttgttgagttaaaggagttctttatatattctagattttagcccctttataaatacacggtttgcaaatattttataccattctgtaggctgcctctcactctgttcattgtgtccttagatgcatagacgtttacaatttggatattgtctagttttacttctgttgcctatgtttttggtgtcatattaaataaatcattgccaaatcaaatgccataagacctttccctatattttcttccaagggttttatagttttaggttttatgcttaggactttgattaaattttagttatttttttaaaacagtgtaaagtaagagtccagctttttttttttttttttttgcatgtggatatcagtattcctaacaattgttgagaagaattttatttccccattgaataggcttggcactgctatcaaaaatcatttgaacatatatacaaaggttttttatttgccttataagtgcaattttacaatctaaaatgtacattccaaaggtatatttatatttacagaatttaatgtaatataatatttacataaatttaatgtttttttatgttcaacatgtacacagcagataagtgaaattcactacaagattttttgtttttttttttaagtatttttagtatatccaacatagattctgtgcagagaggcagttgtgtttcttcctttttactttttgttttgttaaattgcactgactatgacttccaataaaatgttaccagattaggtcagagcagacatctttgctatgtgctcaacttacaggaaaagtttgaaattttaaacctaagtatggttatggatatatgttttcaccttttattcagattgataatggtctttctattcttggtttgctgagtttttaattttttaattataaatggattccgttactgactttttgttgtacttctcctattgagataattatattatttttatccaagttttccttaatgtgctcagttatactgtctttttgattattaaaccaattatgaaccaacgtaataaaatggacatggtcttggtgtattaccttctgtatattacagaaacagagttggtaatgttttgccaaagactgttgcatcaatgttcatggaagatattggtatataatttgtttttcttgtaacattttgttttgtttctagagtcatgcttgcctcaataaaattacttagtaattataccttttttctcatttttctgaaaacgttcaggaggattgattacttttttcttaaaggttgggtagcattcaacagtaagtttatcatacctggatttttcttactggaaaggttttgatcataaaatcaaatttatgtaatagacaatgtcccatttaaatttttatgttctgttatgttattgttggttagttgtgctttttaatgaattcatctattcctgaaagatgttgaatttattggcacaatatcatgtgcatgtgtgtgttttattcttggttatttaaaatgtatgttattttgggacaattaagcattcacttctgattttggaaatttactttttctccttcttttaaatctgaataatattactcaggtatattaattttaattttctttttaaaaactaagtttttaacaatttttcttgtttgttttacagtttattttcaaattatatatttaatatttattatcttttaactttaagcacaatttgattgtatatttctagtttctaaaggtgaaacttacattattgattttaaatcttagtattttatagcatagctatttatatgtaattttatatgtgtatacatgactctgaaatgtagtaagagcagtcatagcatataactatttcattctcaaaacaaatctaaagttgccactttccacatgccaatttaaggtaaaatctaacattttaaatggataattatttaatgaacttattctgtaaactaaccttaccagaaaacatttatcctgagtactatggtctgtatgttttttcccccaaaattcatgtgttgaaacctaaccttcatggtaatgacactagaaactggggcttttgggagctgattaggtcctgagggttaagctctcatgggtgggtttagtacccttacaaaagaagatcctgagagatatcttgtccttccaccatgtgagaatacagggaagaaagcacgtgagatgaagcagggtataggccctcaccagatgccaaatctactggcattgtgatcttgaacctcccagaccccctaaacgtgaaaaataaattcctgttggttataagttgcccaacttatggtaatttgttctagcagcctaaatggaataagacattgagtttaagtaaagaaaaaattgaatatatatatatatgtatattttatatacacacaacatatgatctctgttgcatatttatctttcttttcgtttttatactatataaccctttgtaaatgtaaaaaccattctcagttcttaggctatacaaaaccaggctgcagactgaatgtactttacagactctagtttgccaacccctataaaaattaacagtcattttaatccacatttctagatacctcaatttagctcaaaaaagaaaggccagtcgcttccttatcataaatacatatacatatgttttgtatgtatacatatacgtatatttatgaaaggaagcaactgacctttcttttacatatatgaaaatacatacatatacatgtaaatacatacatatatgtatgcatttatatgtgtatatatacgcattatgtgcatatatagtatatataaccttgttataacaatgtaatataaatattatatgtgtattatatatttattaaaacaaatgtatgtatttatgtgtgtatatatataaagtgtatagcctccttattatatgtatatatttatttatttataataatgaggctactggcctttctttgttgagctaacctgaggaaactaaaaatatggattaaaattactgttaatttttataggggttggcaaactatagtccataaagtacattcagtctgtaacgtgattttgtatagcctaagaaatgagcatggtttttacatttacaaagggttataaagtgtaaaaacaaaaagaaatataaatgtgcaacagagaatgtaagtcctgtaaatcttaaaatatttattccttagttgtttgcaaaaagagcttgccaactcgtctcataggaaataataaaaataatatattattattttcacataaaaattagaaaaaagcctgaagatttaatggggcacaattttgattttatagtaggcataatattgagatttactttaatattttattttatttaatgtccaggatacatgtgcaggacgtgctgattagatttttgccagtgaagagtgacagtaagttattcagaacttttggtgctctatataatagtatgcgtaggctgggcacggtggctcatgcctgtaatccggcactttgggaggccgaagcgggcggatcacctgaggtcaggagttcgagagcagcctggccaacacagtgaaatcctgtctctactaaaaatacaaaaattagccaggcatgatggtggcgtgcccgtaatcccagctactcggaaggctgaggctagagaatggctagaacccaggaggtgggggttgcagtgagtggaaatcgcaccattgcactccagcctgggtgacaagaacgaaactccgtctcaaaaaaaaaaagtatgaatagtagtatgtcacacacacacatacacacacagagacagatagagagagacagagacagagagagagagaagcaatgggatcttgtgttatataaagaaagcttaaaaaggaatttggcatcagggctttttctcttggaatgctgcccccaaaccataagcaaggtcccagtagtctgctagagcagagagaagaaacatacagcccattggccaaatctggcttgctacctgtcttagtttctttgtgagtttcggcttcaataacaaactaccaaagagaaagtggcttaaagaacaaatatttctcacagctctggaagctggagagtccaagatcaaagtgctggcagattctgtatgtggtgaaacccacttcctgatgcatagatgattgtcctactctgtcctcacatagcagaaggataaggaagctctctgtagtatcttcttgtaaaacaaactcatgagcgctgcacccacaggacctaatcacctcctaaagtttccacctcctgataccgctacattgtgagttaagtaccatagcaacatataaatgttgaggaaacacgttaagtctagaacttcctgtttttataaatttttgttgaaacatagctgcaatcaatttgtttgtacattttctatggctgctttcacattacaatgattttgtggaccctatggcccccaaaacttacaatatttaccatctggctctttatggggaaaaaaatgctgaaccttgtattagacaatgaaagtcacatggaagaaaaccaaggcacacctgctaaccggcagcaccaactgctaaagatgtgaataaaaccaccttgaacctttcatcccagccaaactcctagctgaatttagccacatacctaccggtgtattagggttcttttagagggacagaacatcatatatataaaatctgtatatgatatacacatatatatataatttgtatataatacacacacacacacacacacacacacacacacatatatatatatataaatgggagtttgtaagtattaacttacacgatcacaaggtcccacaataggctgtgtgcaaactgaggagcaaggagagccagcacgagttccaaacctgaagaagttggagtccagtgttcaagggcaggaaatatccaccacgggagaaagatgtaggctgggaggctaggcccatctctccttttcacatttttctgcctgctttatattatctggcagctgattaaattgtgcccaccagattaacggtggatctgccttctacagcccactgactcagatgttaatctctttcggcaataccctcaaagacacacccaggatcaatactttgtgtccttcaatccaatcaagttgacactcagtattaaccttcacacctgggaccacataaaaccaccagagaatcactcagccaacacacagaatcatgagaagtaataaagtactgttgctctaagtcactaaggtattgagttgattttcacacaatggatgactaaaattggtactgaagttaggatgctgctgtaggaataaaatgtgtggcactggctttgggattatgtggcaggtggagattgaaaggtcactgacaagactgtaggtagaggctggcagtggactgagaaaattgttattcagggttagataaaaagcagcacctgtgtggtattggcagaaatttggaaaaaaattttccttcagtaacttggaaaaattgaatatttattaaattgcttgtgaatctcactgaggactgtcctggcagaatgaacaaagtgtcggctggcaccctctcagttgcaaataggaccttttgggttgaaaaataaaattgtttcttctccccagcctttcaatgagggtgggggtgggaggaaagatgtccaaagaaagaattgggtctttgtgtaatgatttaattaactttgagactctaagacctgtttttaagaccttataaagaattttggtattgcctcatatacctgctcagctaagttaaaggacttctaggaattttaaattttctatactaagtagcctggctcatgtcccaaggtcattgatggttcaacaactagttctgagtgatgcgtacaggcatccttatttgtagcattcacatggtgtaaatactcccaactcactaagagatcacaaaacaccttaacattgaacaattgtcccttaccagcagtggcagctgggtcctgaatttcaccgtgaattagacccatgattcttagtgagtcccagaaatcattattttttgtgtgtatggtgtataaaatgtctaatactctcaatttcattctttagaaattgcactgttctgtggaaatagaggcatgattggagaatgacaaaaaagggatattagagaagcctgtgatccttgagaaatcagaagcctcagcagaatagctttatagaaaagacaaacttttgagaaaaggaaaattattcccatgagaaaaagtggatctctgagagcaaaagcagcagagacatgcctagaggaagttctcatgcaataaaatgcctgattagttcttagttttgtctttccagattcggcatactagggagagaaagaacatggaaggcactgtacaagagtggacaccgacacaagtgttacagactgaatgtccatgtcccctctgaggccctatgttgaaatcttcaccattaaagtgatggtacaaggagctgggtcctttgggaggtgattaggtcataagagtgtagcccttgtgaatgggatgagtgcctgtataagaaacatgagcgctcatgcactctctctctttctctgtctctgtctctgtgttctcggccatatgaggatacaatgagaagatatccctctgtaagtcggcgaatgggccctcatcagacattggatctgtgtgcaccttgatcaagaatttcccagcttccaaaactgcaagaaataaatgtttgttgtttaagccacccagtttgtggaaagttgttaaagtaacccaaactaattaagatgaggacgatcaaaaagttcaaaggatttgagaaataaagcactggggcagattgtaactgtaactgtggtcggctaattggcccttatgttttttttttttttttttaaggtgttaggtcttctattaattcatttatgtaggagaaagaaatcataatttaaaaattggtaatttaggatttaagattataaaaataggtaacattttcaatttgtgttttaatagccttggttagaatttaaaataaagaggcatggaaaatataaattattctactaaaacaataaaatcaaacaaaaatgctttagaaaatacaatttcatggcaaggcgctatgttcgggtatccataggaaaagggaaaacaatacttgttatggaacttaaaattcagatggataaatatggaaatatgtttcaggcaaggagtgattaaataaaggtaaaattttgtctcagttgctgtcagattggaatcattaattggtcaataaggctgtgattatatggacaatggtttaattttatcttttactgaatggttattgaaagagattttagtgattttactgacaactatttcctaaaataatcagcgaaaaatacttttgacttttctggctttttttaaaacatactttaaaccaattctgaactgcatggtttttcaaattcagaacatatcccactgataggcattcatgaccaagtcatggctgataggcataggacagtttaattaaaactgttgtctatcagactcaaacagtagctatcagcatgggcatatataaatatacatgccacatatactatagtatatgtacaatgcacaatatgttcaatcactcatgagcagcagtcctcaacttgtttggcgccagggaccagtttcatagaagataatttttccatggatagggagtgtggaggaggggatggtttcaggatgaaactgtcccacctcagatcatcaggcattaccggcattagatactcataaggagtgcgcaacctagatccttcgcatgtgcagttcacagtagggtttgtgctcctatgagtatctaatgccagggctacaggaggcggagctcaggcagaaatgcgcaacggccactcacctcctgctgtgcggctaggttactaacaagccaaaaaccagtaatggttcatggcccaagtgttggggacccctagtcatgagatcatcaaaattgtagtatatggaatttctcagcatggctatattagcaaggaaggaatcccgtgattacaatagttggcatttgtaaatgggtagcaaataatgttaactatcacaattaattttaagtattctaattgctattatttttaaatttggaacggaatacagcctgaccaaacaaattaattaagattgccaccacaaaatatgtttcatgtttgtgttaaaatatgtcattaaaacaactaggattttcatgcttattgagctgataaatgccatcactggctcattttttccctatggcgtatttttattgctgctatcctgacactgataataacttgcattattataatcacaagcttttttccctcatctctattgtgccaaactttctattctttacaaggcaaccaccaagaaaatgctgaagaatagtctagttataatggcaacttgagtcttgctttacagaatttttactctacagaaatcgataaaggtaacagagcttttgggttctaatacagtttcaaatctctgaatactattattttgacctcaaaaataactcttggaacactactgaaaaaaaaaggctgcttagaatgatgatgtttgtgacaagaaaatagatacaagcttgaaacatgttactgagctgcctatcacaaaggcatacacttgtaaaggtgtaatccagcttatgaaactgccaagattaaacttttcaaaataagtctgttgttatattttatcatctgtaatggatataataatttggtgagcttgttaaaactaatctttctaaaaataacctacaagtttaagacagggatatagatattgattatatctcaaaatttattaaatgacaattttgtcaatgtatgcttgtctgatattattctagtgctggatacaattacataaagccttatctatgtttcaaaaattttattgaataatacatgaatgtcagttaatgtgaaacttaccacaataattgatgtagttattattaatcttacttttacagataaagaaactagagcccaaacaataagtgatttgctaataacaaaatttattaagtggtagaactggaatttaaaattgtctcttgaagtatacagtattttattgcctttttgatctaaaatattatccaagctatatttatttagtgatgtttaagcagtactttcttaggctctcccaataagctaaaaaacaaaacataattttttttcctcctacaactgatgttggattgggaactaataactggcaaataaaaaaataaacaagatgctatattagattaaaagttttctataaatgagaatatgaggaacatttttcacatagtggattttgagctgattcttgaatgataggatagaaattaatagacgttgagttacagaagacaacatatatgcaattggattcccaataagaaacaaaataaagggccaagtgtggtggctcacgcctgtaaacccagcacttggggaggcctcggcgggcagatcacgaggtcaggagatcgagaccagcctggtcaacatggcgaaaccctgtctctactaaaatataaaaaattagccaaacgtgatggtacgcgcctgtagtcccagctactcaggaggctgaggcaggggaatcgcttgaacctgggaggcagaggttgcagagagctgaggtcctgcaactgcactccagcctggcgacagagcgagactccgtcccaaaaaaaaaaaaaaaaaagaaagaaacaaaataaaggatgtgatgaaagtaatatattaagtgataatagcttaatagcttaagttttgaaaaattcatgaaaaataccaacctataaaattaagaaatccaatgatctccattaaatatttaaaaaaatgaacttatagattattttcatagcaaacacataaaatatacaatcttagagaaatattatatgtgtatattatatatatttatatataaatatgtaaaacatatatttatatatatatgtaaaacatatatatataaatatgtaaaacatatatatataaatatgtaaaacatatatttatatataaatatgtaaaacatatttatatattttataaatgtatgtgttcacattatatttatataaattatatataggtatatttatctatacctatatataatttatgtatacataaatcagtatgacgatgtaaataataagactaccatgggacttaaattgtatatttaatcaaaatatagaacataataggttatttgcaaggatgaggataatggagataaagtgtcccaagtttagtgtagggcttagaaatataataaaaataccaattactatacagctccatcaaccctagcacatttaggaatgatggactttctcacaaattaatattataataccacatacaacgatatttaacattctaaattttcattttccaattaacataacttcacagatttaaagcaaagctacatggagaaacagatggaacatcagcagatcaatattctttttaaaaatacggccgggcatggtggctcacgcttgtaatcccagcactttgggaggcctacgtgggcggtcacctgaggtcgggagtttgagaccagcctgaccaacctggagaaaccctgtctctactaaaaatacaaaattagccaggtgtggtggcacattcctgtaatcccaggtactcgggagggcgaggcaggagaattgcttgaacccgggaggcggaggttgcggtgagccaaggtcatgccattgcactccagcctgggcaacaagggcaagactccgtctcaaaaaaaaaaaaagaaaggttttaagttattgaacgaaggtccatatgaagaagttaggaaaatttgtaaaagaaagaaagtaataagataaacacaaaaattaatgaaatagtatactagaaataatgaaatagtatactagaaaaaataaaatcaaatttttgtttttaaaaagatgacagtgatacatgccaagaaaaaataataaagacaaagatcccaaatatcataactttggtttaatactaaatggaagctcccagacaatgtagtaatgcaaaaggaagaaataatataaaaagaaagctcagatttttcaagaggacatagaaagtaaaaatgtagaacattcaaaaggatttatcagtaaatttagagtcataaaactgagtttagaaacctttcaggatacaagatcactataaaaaaattctactaagtttctataaacaacttggcaatgtaaatagatatatattttaatttcaggaaaatatataaaacacctagaaaaatattcaacaaaatgtgaaaggcacatgtaacaaaattataaagctgaggaaaattataaaataaaaaaaatttagttaacaagaaagacctcatgtatacagatggagagacttagaattagaatgatttgcattgtccccaaattaatctaagaggtcaatcattcttaaccaaaactctaacaagtagattgtaaaatgtatatgtgaagaaaagaagtgagaatgaccaaaataattttgaagaagagaaaacaaaatatttgctcctccaaatatcaggaattattataaatctgaagtaattaacattgcataaattaaggtgtgataatgaaataaatcattaactagacaagaagatggactactttttaaaaattggtactgagttattcactattcatatatagaaaaaatgaaatgacaccttttttctgtctgcacaaaattctattctaagtgaattgtatgttcaagttcaaatctaagttgtatatcttaattgtgtatcataatcaataaaaatatatttttgccctgtggatagttttttaaccaaaaggcatgaaagcgcttatcaaaaatgtagtgattagtgaactaaactattaatattaaaaacatcatcaaaaaaccaagaagatactaaaaataaaaaccattttttggaatatacattagcaacttaattaaaatattatcaatacaatatacagatatacaactgtatatgtaaaataaatgaaaatcaacaagagatctcatccactacatttaaaaagaaaatattttaaagtccaatacaaaaagggcctcaccatcattacttatcaggaaattaaactttaaaaaatgctatgcacctacaattacgaataaaattacaaagatttaaaaaataaataatttatgagaatgtggatcaatagatctttgatgaaacagtaaattaaattactataactactttttaaaaatctctaaaaagtttaggaatatctactgaaattgaacaaatatatattcataaaagtatgctcatctgcaccatgaaatacgtataaggaagttctgtgtaacttaattattatgactaaaacctggaaacaacacaaatatctgtggatgacacaatgtgaaagtaaattagatctatattaggtatcaatttaaaaattaatgtaaaaactcaatggaccaagttcccattaaaataatttatcttttaaaaagtaaattgggataaatcacccaatggaataatatttagcaataaataataatgaagtgctacaaactgtttacaaagataaatctcaccagtataatttaatcaaagaattcaggcatgaagaagcacaagttttatgctttctttgaggtaacatttaccagcatgcaaaagcaaactgtaaaccagttttcatgaacacctgttcagtattgccttaatattttttggtgggagtgagaaatactgaattcactttctctttattgacctatagtttcacatatgtttatgaatactaaaagcaaaatgataattgaaaataatcatgtactgtttaactgaggacaaacacagttttgaattctttttaacttcgtgatttataggtttattaatccattaattgttctctaattaattaaatatttatcaaacacctaatagtatgtttaaggtaaatttgttccaaaaagcccttaacaggcaaccagtctaataggctagagagaaaagccaatgtttacaaaataatgcatactttaattaaataattcattctttcataccaaaaatattttttgaattactacaaaatgcatcacatgtatgtagttggaaagcaatggattttataaagtgggggcaaacagagaaaatactaaatgcagtgagaatataggaagaggaatcaattagaagttcaaggatgcctacggctttcatggggcctcaagctaatttgattgagagggggctatttaagataaaatgccaagttgcctctatacataaatagttatttcaagtagggaaaagaaaaattaaaaaattttaaatgttgacgcatactgcatatattatgaaatttttaaaagtgatacactctttatatgaatcaacttaccagatactactctgtagtattgttttcctttcatctagctgttttctttgaataactcatgtgacatttctctacagagaaaagtgaaagatatttttgtcttttaattattacaatcaacatttgttttggtttgtttttattttattctatttacttatttttttaagtttttttgcctttttttttttttttttttttgagatggagtctcattctgtcaatgggctggagtgtagtggcgtgatcttggctcactgcaatctctgcctccaagttcgagtggttcccctgtgtcagcctccctagtagctgcgcaccaccatgcctggctaattttttgtattttagtagggatggggtttcaccatgttggccaggatggtcttgatctcctgacctcgtgatctgcccgcctcggcctcccaaagtgctgggattataggcatgagccaacacacttggcctattttttcaagttttattttggattcagagggtacatgtgtaggtttgttacatgggtatattgtgtgttgctggcatttggggaaggaatgatcctgtcacccaggtagtgggcatggtgcccaataggtaattttcaaccctcatctctctctctccccagttagtagtgcccagagtctactgttcccatctttctgttcatgtattcattgtttagctcctgcctataagggagaacatgtggtatttgcttgtctgttcttgcattaatttacttaagcaaataccacatgttcttgcttataagcaggagctaaacactgagtggaagatggcctccagctgcatccatgttgctgcaaaggacatgatttcattcttttttatggctgtgtagtattccatggtgtatatgtacagcatttttattatcattttattttattttattttttgagatagagttatgctcttgttgcccaggatggagtacagcggcgctatcttggctcactgcaacctccgcctcccaggttcaagtgattctccttcctcagcctctcaagtagctgggaatacaggcatgcaccaacacacccccggctaatttttttgtatttttagtagagatagtgtttcaccatgttggttaggctggtctcaaactcttgacctcagatgatccaccggtctcagcctcccaaagtgctgggattacaagcatgagccactgtacccggcctcacatttcattatctaatccaccactgatgggcacctaagttaattccatatccttgctattgtgaatagccctgtgatgaaagagaagtgcaagtgtctttttggtagaacaatttattttcctttgggtagggtagccaggaattgctgggcctaatggtagtcccattttattgcttttttttaagaaatcttcaaactgctttccacagtggctgaactaatttgtatttccactaacagtgtatgtgttccttttattccacatctttgataataattatgatgttatttaacctttataattgccttatgttaaatattattctaatatcatttatatttttgtatctgcaaaaaaagtatgacatgaaaggttaattaacctgcccctaacaatccgtaagtggtagagtccgaattttaattcaggcatttgcttcagtatctgcactcttaaacactgcactgaactctcatcactacaaggtactgtattaaagttataagaacataaatcatgatcccaccggagcttattgttcaccatcttatcggctgctaaatcccacaggggtttctttggagatttgtcttctgctgaatggagctgcctctccagtgggtccaatcgcatctgtagccctcagcctgatgtagggttataaaaggctggcccaggacctcaacagggataacctccaagtaaggtttatgctccatagtagcccctctgtcgatacagccaaggctaggttttacctgagaccagatccctgctcagctgtctcccacttcccaatttttcttcacattctctcttatattctgaggagcgcacctccaacaaatcgtatgcacttgaatccttcacttagactctgcttttatggaacctgatctaaaacacttttcattcttattgcacatctttaaaatgcaaaaactgcctagaaagttgacatttgtaaaaataaatgaagtcaactgcagatattttcatatgtatacatttctgtatttaataatttctatatttccttcttacaatcagcaaatagattgtgaaaaacagaaaataaagtctcttttctgatcatgtggggttttcttctactacctattgtttattgaatcttcttaaccattttatatctactcctttaatcatcagaacctaatattttaataatccttagaattaattattaaatatcattattataatttagacaagagagttggaagaaatatattaattaacttattatctgtgtgacagtgggcaagtggtggatagggaagtccaagattatgttagctgggcatggtggtgtgcacctttattcccagctactcaggagggagaggtgggaggatcgcttgagcctagaaggaggaggttgcagtgagccaagatcacaccactgcactccagcttggatgacacagcgagatcctatctttaaaaagaagaaagtcaaagatcatgttttaaatgtaatatattggccctgatcaacaaattaatcactttgctttgttcctccttggaaagaaaatctataaagaaggtatcaattagacaagttccttaaaggatattaaaccactccatcaaattacaaattctcaggaataatcagttcctcatagaactagctaatcaactttattgactattgaactgaattgaccaatttaaatagttgatttggcttcacataagtatatctttgaagagcaataataaagcccaggtttaatgggagaggtgtcaaactatattagggccagatttggaaactgacatatacacagaggtacatatacacatgattttcaaattgacatttttgccttattctcctgcttaatatttcaatattaataattaaaaaatgcatatttaatgtaagacttttacatttttgcatgcctacaaggttgttttataaaaataactggctgaatgaaaaaccttatgtctgagaccattgatttgggcaatggataagaagaccttgaggacttagtgacaggtagtaagtctgacttagcaaagaaaagtaaaatataaggacttctaaaaacataaaaagctttattaaatactgttgcctaaagaaaaacaatgggcttttgaagaattaaagttggttttattcagaagtcctactgaggactatagactgaggcctgcagcctggaaatgttaccggaaaggggtctcaattcataccccaagagagggtttgtggatcttacaaaaggaagaattcagggcgaatccatagagtaaagtgacagatagtttattaagaaagtagaggaataaaataatggctactccatagacagagcagccccgagagctgctggttgcccatttttatggttatttcttgattatatgccaagcaaggggtggattattcatgccttcttttttcagaccatatagggtaacttcctgatgtggccatggcatttgtaaactgtcatggcgctggtgggagtgtaatagtgagggccaccagaggacactctcatcgccatcttggttttggtgggtttaggccagcttctttactgcaacctgttgtcttagcaggatctttatgacctgtatctggtgcggacctcctatcttattctgtgacttagaatgccttaatcatttgagaatgcagctcagtaggtctcagtctcattttacccagcccctattcaagatggagttgctttggttcaaatgcctctgacagaaccagcccattagagaggttcttttggactgctcctaggctgtaggcctcaggaataattctcaggaagacttccagataaaactagctttttttctttgctttgtttttgtgggccatgttttatttgtcctttttcctcaaacaggataacaaaagatacagactattcaatacaatgaaatagacaaaacaaattctaagagactgtgataccacatgctacatttaatcttattttattcatgtttgccttgggatggggaatagaccattcagtaaaaacatacagtaaaatcaaaatgtcgtatcatatacaacttttaaactacaataatgatggactttaattatttccacacacacaattttaacattagctttttaaataaacacaagacttctaggagtaatttataataaagtaattcctaatttttctttatagataaattcctatatacagtgatttcttcatagacaaattcctatatacagtgatcgtttacttaaaataaacacgtaagtaaattaagtacatggacatgcttaagatgagctaacattatatattcagttaggtaggcaacaagctgtagtgccagatggagtaagtgtatttgcaaataaattttaaaaactaagttactttttataattaaatacagaaaatatactgatttgctaaaataaataagatgtgatatattaacacttcactataaagaatgcataccagaatattcataaacagtaaatgagtcttattaagaatagtttactaaaataaatgctggctaaatagatgtgcatattgtgaagcactatgagtggtatatgttttgccacatacttctgttatcttgagctagataacacatgtgtactcaattcagcagtcattttcagttgttactggtatcatatgttttaagaaatgtgtacagtgtgaaaaacttaaaaaatattcatgaataaaaaatgttttagaaaaaatagatattttcaggcaattatgtagagtctcactgcgtaaatttcaaggtaagatttgtttcctataaaacggatcattgttctacgagaggatgttttttacttgtcttagtgcatttcttttgcctcctctagcattgcattattttgctctttgcttatttttgtgtgcaaacgacatgccagttaaaatgaaaactacctcatatgtagaaaataaggtctggattttaaaaaccaagagctaatccttactaaattacaccatctgattcaagtaaaaaatgacttaaacactagtgataaaataaaggcaaaacacatttcatgaagaatgcaaagataaatgtttgctgagtgctttagttcacatgttttaaaatgctgctgcaggttttatgaggaatttgaggggaagattccatagcagaaggtggtaatgtggcctgtattgacttaagtagtgacccaactggactgcgaagctgcaggacgcccacggactcgaggtgcttgctaaagaggaactccaaactgttgttcagaaatccttcatttcctctctccccaagcttcccatcctctactagctcagtttctagtatttcagtatcttctttcctgttaaataacttgtctaagtaactagtgtaaatgtcgtcctcctcaactccttcacacttccttacctcacaacaaaactaatttgtgataaaatagttctccccaccactcacaaactggctgtcccaagaagattggtacaagacttctaactgagccaaatttgccattccttttttctgtttttcttggcttactgtctttgttatcaaatttttcatttctagttgggaccttgacctattcgagttatttcatttctcaacaacatcagtaggctcatgttgtgaactaggttgagtagtttctgcaataaaggaatcaaaatcaaacccctgatttttttccctttgtttttcaaccagttgctgtgaggcttcctcaagcgctatctgggctttaaccaatccattcctttcacattttcacttgcctttcttatcagatttttctctgctttattctttccgattggaaatatctataataaccttgggttcatagtaatggttaacttcactcgctctccaaactaagttatctaaatatgatgatgacctggctttgtagttacaaatatgactacacttcaaatccctatttgtttttatgatgatctgggtactgccaaaaaggctcagtagagcaattggatcctccagatactttatgcttttccgaatgtccatccaaatattttcagggatcaactcgtacttcttcatcagtgatatcagacagagctctcaggtcaagcagaacttcatcaataccaaagttgttatgtataggccaatcatgcactgaaaactaacaatcatacctttcccagttataaatgtgactgtgagtttcatccataagcaaaatatcataaacttcatcttcaatatgaaaaagatgacttgaaattggctcatccgttggaaaataatatatgctcatgtaatgatgggagagcgcttcttctgctgttaacccatctgtagggataaatgtcaaaatttgttccaggagatccagtgcttctcagctaattccctgaagcagctgagttaaaggtttctgtggttcagtcatttcatttctaatgtaaactggaattacactgagaagctcctgatgatcttcctcatgtataacaggactagattctaaaatcagctgcatctgttcgagttcacgtgcacctgcaaaaagggttttaccagtcagcatttcagcaaagatgtggcctgcagtccacatgtcaatggctttactataactattagaagaatgtaaaagatgtggagatctgtaccatttagttaccagtccttcagagagatgatccttatgggaataatgaggatccatgatttgtgcaagacaaaagtcccctatcttcagcatcatgtcttcagtattaatgaaaagattagttggtttgagatatctgggcaatacacttgcagagtgaatacttaagccacgttagcagctgatacatgaaaagtctggcatgcttttccagtaaagggccctcctccatcatattagccaagtctgtctccatgtaattctgaaaaatgtaaatactgttaagtttggtaagagagttcacattgtttgttaattggcttccactggtactaggaatttcaaacactttcacaatgtcacgatgtcaaatcttctaataattttgatttcatgtagagcatttttgacactctggggatcagtaaggagaattttcttgatggattctcttttatcacagtcatcgtctacagcagaaaaaaaaagttttccttttgaattgttgaacttgtgtaaacaaggaagaaaactgacatcaaaaggaaagatcttttatacaggcagaagaaaaataattatgcttccacagcaagatgatttcttgatgttcattgcattttccaaacaggcttgttcagttccccttagatataaagctcaaaaagctctactcatattgagaatttaagagattgcagtactcatagttcaagaaaggggcagcagctctgcagacatttaaataaaacactcaagaagctcaaatggaatgaaattatgtactatgcacccagatttactgtgataaatgatttaacatttaacaaaaatatgaataaatatgcacacaacgcaacaggcttctgtgaacattctcctcacagtgcagacacattcagtgttggactggccctgagcagcattgttctaaggtgctggtaagcactgtttccattttgtttcttttcttcctttgttgctatatatttcaccagaaagccctggcggctgttggttaacagatgtcttttgttagtgatcaggtggctccggctcaccacaatcacaaccaaagctactgtccgtcttactctgatccaacgggacttccactcatcgagagggtgtgggcccatggacagcccccagcgtgggctcacgtctccagctgtactggcagcagcagctgctttgccacagttgctgccatgccaaactctatttctctaaaagtttgacgttttcttcagttggcaatatttatttgaaaaggaagtgaaagtgaagtattaaaatacagtgagagatgtaattctcaaatgcctcccatgaaccagcagtatcagcgttacccgggaactcagtaatttaaatgtttgtgccccattccagacctttaaaacatgaatctgaggacaaggccctgaaatttgctataacgagcctttcaaatgattccgatttgcttaaaggtttgaaaatcacggacatacggagtaaaatggagatgtttatgaatagggctcatgtaacttagcaaattttgccggttagaaaggctctttgctgtttatctagttgtttcattgttttaattaattaatttatttattttttgagacagagtcttgctctgttgcccaggctgtagtgcagtagcacgatcttggctcactgcaacttccacctcccgggttcaagcgattctcctccctcagcctcccaagtagccgggagtacaggcatgtgccaccagacccgggtaatttttgtatttttagtagaaacagggtttcatcattttagccaggcttgtttcaaactcttgatctcagctgatcctcccccatcagtcttccaatgtgctgggattgcaggcgtgagccaccgcgaccagcccacatcatacttaaaatgtatgataacaatagcacaaagaatggatgggagaaaatgaaaatacaatgttttcaggtccttattctgaaattaatggaatataaaattatcagaaggtagatactgaataactatagatgtatattttaaattagcctgccaacgcgcccagctaatttttaattttttttaatttttagtagagatggggtttccccatgttggctaggcttgtcttgagctcctaacctcaggtaatccccctgccttgtcctcccaaagtgctgagattacaggtgtgagccactgcgcccagcctgtttattttaatttaaggattatcttaatatacaggtcatgaaggtttagagatacttgattttgctaagcaattcaaaaagaaatgatgcagaaatcaaaaggacactattaatttcctaaaatagattaatatttaaataaagtctttgctatgaaaacagaaaacactccaggtatttaaattacagtgaaatttaagccagaagcagtggtgtatgcctgtagtcccagccactcaggaggctgaagcaagagggttgtttgagctcaggaactagaaaccagcctagacaaaacagcaagaccctgttttaaaaaaacaaaaaaacaaaaaaaaaaaaaaaaaaaaaaaaaaaaactgtgggacagagtccaaggtgtgaggattaatagagcccaggagtttgagaacagcctggtcaacataaagacataccaattctacaaaaaaaaaaaaaaaaatcagttataattaacaaattagctgggtgtggtgccatgtacctataggcccagctactcaggaggctgaggcaggaggattgcttgagccctggagattgaggctgcactgagctgtggttgcaccactgcactccagcctggttgacagaataatttaaaaatgggatatatacaggaaacttgttttctttaaaagtattggaaaaggataaggaacagctatcaggaggaatcatgggaggaaatctggaagtgtagaaatcagggaagttatttccagtggtccagctgcctgcatcattaagaagagctgtactctagggaattagccactcaaacagcatttcttcaatgtgttcagcacttgccatatctgcaggggtaggaaatgaatgatgtctgctttccttccaatttccaaaccttttatatgctcctctgattctatcatctatattggaatcctactggcaagggagtccaggaaatgtagttcctagatgtccagtgcttgacacacagcaagacattaaaagggcaatagctgttttaatacaaaaagaaaacattccacacaaccagtctacctctctggatgatcagctttgaaacacacctttctatctacattaaagtatagaaacaatcataataaaatcatgtatatgttccaagtataattgcataagtgaacaaaagatcattcttttccttaaaaggaaagacacgaaaacccatcaattattggagtcatatctgggtgctctagagaatgttctggtttgccaacatacacccgttaccccataggagtctcatttctttatgatattcaggatcaatcaccaccatggccatatggaaccacagatagccagatgaacaggaagatatcagaacaggtaggacaaaatatcagcttctagttcaatcaaacctttgttgtgttctcttttggaagcactcctatcttgcagacaacaagacctctaaataaaaagaggacaaagatggaaaaataaaaagtaagaataactgagagtgcaaataaaagtagtagtgagagagtattctgtttgcatctcttgtttctcatatctatgttccggcttcagtaaaactaccaaaataccaagtctgtggcatattcctcatagattggtaacctaaatatgtaagctcttataacctagttgtgacatgacttagatttattattctgttacaactctttctatatatagcaaaaccattagttgtggtaggtgttgctcattgccttttttgctataaaatgattaacttgtcaaaagcagtattgtttgaagtagcacaacaattagtaagatattcactcaatctacatttgggcaaaagcattggaagcaaggaaagtaactaatattaacattaattttattttctaacacaaaaaataaaatattgaaaaaggttcaatattatcaacctgccaccatgtagccagtttgttctttcatggagagggagcatactagtggttccgctttggctcctacccttggcagattgggcactcagaaatagtgacaggtgtcatgagaggtcatgaattaatgaacaagcatggtatggctgagaatagaagctgacaatcatatagagaactggataattggttctcttgattatcaaaaccctcccctacagtgggtgaactttgatgagcttccaaatagaacacaaatcatgctcaaaatatccatcttactatcagcataaaaccatcacaagtattcatgtcaacaatccatgaccatgcactaaactattccttattatctaaaaatcagtatatatcttacttgtgctcatattttatgcaaagaaaattgagcaacaagcttcacttttgacatgccaaacattgggaggatgtccttccagttttttcacataaccacataggtatgccattgtaatgcagcatcatacctcttcaactgatgccacaaccttctaaaatctacgaataagattttgtttatttttttgatttttcctcagacacattttatgaactctccatgagcccataagaggggactgatggacaaatatgaatataccataagtaggtacccagaagttgaagtcgttttcaagagttgtaaatggcctgagattttaaccaacttgcaagctaacaaatttgggtgccagagtctcatggatattggtgactaacatccattggtcagagatgaagagaagttaattactcatggaaattacagttgccagagtgtcaacatattttactaattgcccaagcccagatgttcccaggacaatgacaagaggatcagatgacaccatcacccacaatgagttccattgcaagaaaggaaccctcagctctgggaaccctgatattttatactgggccttaaacatggctttcctttgttcttgaaaaatatatatttattatacgagacaataaacatacctgtcctttgctgtggagagagtaattgaagtacatatacatgacaaataaattgtatctagaatatatatttttatttatttgtttatttttgttttgttttgtttgagacagagtctcgctctattgcccaggctggagggcagtggcacgatcttggctcactgcaagctctgcctcccgggttcacgccattctcctgcctcagcctcctgagtagctgggactacagacagccaccaccacgcccagctaaatttctttttgtgtttttagtagaaacggggtttcaccgtgttagccaggatggtcttgatctcctgacctcatgatctgctcacctcagcctcccaaagtgctgggattacaggtgtgagccaccacacctggcccagaatatatatttttaaaagcccttctaactcaatagtatgtagactaataactcaaaacataggcaaatattttgaacaaacatttcactaaatatacagaaacgtaaccacataaaagcatgtttactacttttaataatcagaaaattacaaagtacatcacagtgagtttctactatgtacaatagaacatataatattcaaaagactgagagtatttatttttaacaaggatatggaacatatttttctcacacattgctggtgatcttataaaaacatacaatcactttgggaaaacatctgtgagtttcttacaaagacaaatattgtttttaacatacaaatcaccagtttcattctcatatatgtatatcttatgtattcacttccctctgttacaagaatgtaagcactgtaacaaatattcaaattccaaatcattgttttctaatactgactgaacaatagaattatttgtatatattaaaaaatatttatgcccccgttgacatacacagagagagtgtgtaagagagagagagagagaaagagcaagaaagaccccaatgcctaggctgcactccaaacaaattcaagtagaatctctagaaacagggtctgggtctgggtatcactgtaccatatgaaaaaattccataggacatcaaagctatgccagccattatcacaaaagacaatattcctacttgctttaactacttgaaggaacaattaagtagctacacaaacatttgtgacatattttacaaataaatttggaaatcactgatattaaatgtcacgatgaccagtgtcataaattatttctaccaataaaatatcaggaatatcacaaatttaaaaactagtatactatatttgggttgccatataagaagcctaaagcagttagaatagtacttggcatataggcagctttcaagctttcaatgtgttagtaactatatatatatacacatatatatatacacacacatatatatatacacacatatatatatacatatatatatatatgtatatatattttgagatggagtctcattcttttgtctaggctggagtgcaacggcacgatctcggctcactgcaacatccacctcccgggttcaagcgattctcctgcctcagcctcctgagtagctgccattacaggcgcccaccaccacaccgagctaatttttgtatttttagtagagagggggtttcaccatgttggctaggctggtcttgaactcctgacctcaggtgatccgcccaccttggcctcccaaagtgctgggattataggcgtgagccaccacatctggccaacaataataatattaataactattcttggtattattattattaatagtgatattcccattacttttatctttctctcaaaatcgagataaaatgtgatataatggacatgcaatcacaagttttattttatttttaattataattcccccagcatatacatttcacaaaactaaaattaattttgcctcaatatctttattttttaaataaaatggtgatgtagccttacagatcaatgagactctgtagtctgttaaaataattaaataggagctaacggacagaaaaagattctaattatttaatgtgcattaaaaatatcaggttaacaaagcttttgcgtaatcttatgcaatacaaatgttagttttaatctttttgcatggctgtatcttgtatctgcagcatctctatttcacaatcatttccagctgtatgacagaggctggaattaaatcttctacaagtgattttcaggagtaaggatccatgagtatagctactttctgaaattcgtgcgtgtatgcgagagagagagggccacaaattagttataatatcactctggtcaattatacccagcaattgtagaagaaaagatattagatttttaatttaaaagctatagacaaaataactctccacttcttattagaatcacggacccgatgatgttcttctcaatattatgtttctctctctctctctctttttttgtatattaagctgtttattcatgtgcttagaacaataggaagacaaattagttgtaatgggtaaattatttttcagatcatacatgttaccaacttccatttgcctccattgaagtttagattttaagcagcaattaaatttccaagttgatttttgcatataagcagcaattaaatttccaggttgattttggcaatctaagttaaaatgatccttggcaatatgtaagcgagaaagtattctttgcttcttacagaatccgtatcaggtgatggttacacaagcctccacattttcaaaagtgtgtattattacttactgttgtcccttcctttttttttaattaaagatgtcccatatttcccaaaattataaaattctggtaattttatttgttggatagttctcacagtgatcatctcctctacaatatcactgctccacggagatccaagtcctcatcattcattggctggtgtcttctggtagatggcttattcttttctcatcaatttatctcactgatcaattgacgaaagatccttaccaaatgtataactcctgatgtttatattttttaatctttatcatcacttgcaaagattttcttctcagtatgtatctcaaaaacattcttgccttataataattgttatttgtgtggcctctgccataattaacaacctttgtcctgtgtatcacagacaacatacagaatgtcatgaagaagtcttggaaatcggattatttgagacctttcactaataccttcaatattacatattctgtgtctataggaaatttctactcagaagaaaggaaaactcctatttttacacaatattcaagggtgaagaatccacactgcttgcttctagctatcactctaaagccaagtttcaccacctgatataaacagctatctatttcttaggtcaaaatatttttccacgactcctacacatgcttctttataagatcaggactaaatccagcacataattctaggctatgttatggatgtttacgtggaagagatgaaaacccactgtaaaacttaactcagaagtgtaatatattcaaaatcaaagatttagaaagctgtggctatgtaataagtaagaggtaataaggttaggattacaataataggaagtaaaagcatttgcattatggatatatgtttaagttttagccaaataatttgaaaacactggctatagagtgagagcatacaaaaacactccgtgctgactgaggattttgcctgaactacacaaaaagtaggggaacactgggggaacgatctttatttttcttttagaaaagtgaaaaatccagaattaagtattggttattttattgtacagatgctaattagtattccaagagcctattttagatagctggttgaaatgtgagcatcagcatctagagggagggatgatatgtggaatatatatttagctactaaattaacccccaaatctctgtgtctttacagaatatttagttcttaaactatagttcagtaaatattgcatggctcattaaatggcactgtgacaagtctcctgtcattttgtgattccatcatcttaagcacaatacctctatatagccatcacagaaagcaatagagaacatagaataccaaataggagtagttatgcctagtactgaagggttccatatacttcttcctccataatattgaccagaactcagtcacctggtgctaaaccaaatgcacaggaaacttgagaaatgttttagcctatctgttcatgaagaaaaaaatgtgaccagtaatttcttggcaatctgtgacagtctgtggaattaatgagcaagctaagaaggatctctttataagttttttttattatacattaagttttggggtacatttgcagaatgtgcagttttgttacataggtatacatgtgacatggtggttttctgcacccatcaacctgtcacttatattaggtatttctcctaatgctgtccatctccaagccccccaactcccaacaggccctggtgtgtgatgttcacctgcctgtgtccatgtgttctcattgttcaactcccacttatgagtgagaacatgtggtgtttggttttctgttcttgtgttagtttactgaaaatgatggtttccagcttcatccatgtccctgcaaaggacatgagctcatccttttttatggctgcagagtattccatggtgtatatgtgccacattttctttatccagtctatcattgatggacatttgggttggttccaagtctttgctattgtgaatagtcctgcaataaacatatgcatgcaagtgtctttacagtagaatgatttataatcctttgggtatatacccagtaatgggattgctgggtcaaatggtatttctagttctagatccttgaggaatcgccacactgtattccacagtggttgaactaatttaccctcccactaacagtgtaaagggttcctatttctccaattcctctccagcatctgttgtttcctgacattttaatgatcgctattctaactggcatgagatggtatttcattgtggttttgatttgcatttctctaatgagaagtgatgatgagctttttttcatatgtttgttggctgcataagtgtcttcttttgagaagtgtctattcatatccttctcccactttttgatgtggttgtttgttttttacttgtaaatttgtttaagttccttgtagattctggatattagccctttgtcagatggatagattgcaaaaatttgtctcattctgcaggttgcctgttctctctgatggtggtttcttttggtgtacagaagctctttagtttaattagatcccatttgtcaattttggcttttgttgccatggcttttggtgttttattcatgaagtcttggcccatgcctatgtcctgaatggtattgtctaggttttcttctagggtttttatggttttaggtcttacatgtaagtctttaatccatcttgagttaatttttgtataaggtgtaaggaaggggtccagtttcagttttctgcatatggctagccagttttgtgtttagaaataattattacattttaactctacagggaggagtttctttacacaggtgagattctgggcgggggtgtcttctgccatagaacataaaatgaaacaagacttggccatgacataggaggacatagaaagggaatttgggaaaggtatctgtgtcctcatgaagggatatttggacagaaatatcttgtgccacaagaggtcttcagacaaggacattttcttataaatggttgtgttaccttaactgagagaatcaaatttgtcaaatgttgcttgcaggctgagtaagataatttctgagaaattacgattggattcaacatttagaagtaaactgctgcttgagaggactatagggacagaatcctgggcagaaaagataaaagaaatattacagttgtaaaaatgagcatagaaataagtgaatagttacaagacatatagggtcacaggaggcatttttttcttttttttgtttttttttttcatgtaagcttgtacattcaggactaattcaagaaagatggaacagttaattatgaaaaggtaaatgggaaaaaatgcatatgtaatgagattagattatcaaatgtactcaatccagtgcacaagaagacctggccttgggcaggacaacaggtagtaccttagtacatcattcaattagggacttagtgactctggtagctttgtgtatttgattttggttactttgtgaccagaataaacctctagaacaaaatattaggggactggaggacatgtactggaaagtcatgggtgtaggctgaagtgcaggaagcttggatgtcagtgaaggtgtcattattggcagtgtcaagttctagggtatcaccatggtgaattcaaggatttaaggatgcatgtgtatgacagtatcaaatataactttatttacttctagtttattttagggtaaatttctctgccaaagactcctgagtatatcatacaaataggctgaagtgataaactgaaccctaaagcgtaaaaatcaccctagctattgcaaactcttgcttaataacttcaaataaattattcttgcttttctgattgatgataaaactagagagttaaaatttagctaaattaaagctaaaatttaacttattatgtttgacatagtaattatttctgtcaatttgtctttggtaattactacattataattaaatgtaaaaattaattcattatttctgttctgaatgcatgaacatttaccaatctcaaaggcaaaggagggcgttaaaaactttctaagttgaaaattttaagctgaatagaattaaggaacaatggcatatatgtatgccattctaaaacaaaatttaatataaaacaaaattttcttcttttggtgaatattaacttgaccctaaaggtcatattttattaaagtactaagctttattttttattttgtttcaattttgaaaattcagatatacaggggttagtttataacaaaaacaatatttaattttcatattttaaacacatttaatgaagtgcatgtcaatgttaatagtaatttatgaactaatatatataattattaaaataaaaaatccaattttaaaatatgatttataattttttaactgtacttcaaaatatcacagaatggagcgacaggcaaaggaaagagggggaagagaaagagacagaggaagaaacagattaagaaaaaaaatctaaggatcaatattctagttccaagaaaaataatgtaactgtacaatatgcatttaaagttgaaggcacaaaagcttgattcacagctttcctactattcttctttttggagccattccaaatgtcattattaaagtggctatttacatatagtgtcataacatggtaagctaaaggctaaagttgatagtagaaagaacttcattaaaaaggctatattttaaaaataagaaagtctttttacaagtaatgttaaatgggaaattaaggcaatgacccaaataattaaagtaaaacaaatcctaagcatctgagggaaaaatggaagtttgaggtttaaatcatcacaaattactgtctacattcatcaaattaatggggcaattactcagcatgcactttaaataggttacgtatcttcaaattgaagtcatttctatatggaaagactgatttactgactttgcttttttctttttctcaaagtgtcagtgattgatttcttttaataaaatgaactaattctaatattgacaggagacaaattgtatagttggtctacactgtctagctgtgtttattttatcttgaaacccatatattttgaggttcgaatgctcaacttgtagcaaatgtaaaaatcacataataatatttgattcatttaagttttattttttctttttctttttttgtttctttgagacagagtttcactcttgtcgcacaggctggagtgcaatggcacgatctctgctcactgcaacatccgcctcctaggttcaagagattctcctgcctcagcctccagagcagctgggattacaggcgagagctaccacacccagctaatttttgtatttttggtagagacagggtttcaccatgttgaccagactggtctggaactcctgacctcaggtgatccacctgcatcagcctcccaaagtgctgggattaaaggcgtgagccaccgctcccagcttaagttttcttaaatatgaaaattagaaccttatgacctttaaaactctgcatacctattatttcctgaaattctttgaaaaccttttaaaatgcggtcagagcccacaatcttatgtttttcataaacatcaaaggacattgagaatggatgaacagcagcaacatgtacatctctctgcttcaatagtttatctttctttcttttccttccttccttttctcttccttccttttttcttccctttcccttttccccttcctcccttccttccttcgttccttccttccttcgttccttccttccttcgttccttccttcctcccttccttccttcgttccttccttccttcgttccttccttcctcccttccttccttcgttccttccttccttcgttccttccttccttcgttccttccttccttcgttccttccttcctcccttccttccttcgttccttccttccttcgttccttccttcctcccttccttccttcgttccttccttccttcgttccttccttccttcgttccttccttccttccttctttttttcctccctctctccctcctatgttttccttcttcttcttttttcttctctcacccttttttattatttctttgccaagggagaacaatggaaagtaggaaatagtattgaaaataagaaaaaattgcttaaaacagtataaattcagttacaccactatttttcaaaaataaaattcaaattttaaataatatgaaaatgttatgtgttcttaccatgaaaatgataatcataggaggtaatatatgttaaatagtttgttttagccattccacaaagtgtacatgtggaatcaatgcattatgttgtgcaccataaatatctacaattttcacttgtcaattaaaaaaaaggatagaagtttcaaagccaaaatttaaaacaaattaaaagaagaattctacaaaggcaaaactattgtagaagaaggaaagaaatcgaacttatttctctactcagttgataaatgccgttagaattggatccagttttgcggtactggaaataaagcttctaagagtatgtgtgtctgtgtcttttgatgggcacatgcatcgcattgacatctgttgtgtgttcactgatgcaaaattgtgggtcacaggtcatgagactgttcactgaaaaagctttttctgacaaaagtttttatggttgtttatacgaatttaaaattttaccatgaatgtatgagagttcagttattccatacctacattaagtttttccatatttatatctaaagttagaatattctttcttttgaatgttaaccaattgtgtacttgcgtggaggtatatcacgttggttgctaaaaaataattttattgaaaagaagtttatgtgtttattggaccttgaaattgtatttagtttcatgtgtgtgaattccctcctttcctattttcattttgatctttgtcttttttatgaacgttagatttttttacagatttttacacagcattagatatgagtgttacaaaacaaagcatgatttttttcaaaaagacttaagagtacttatgaattcctttattcactctcttaggtaggtcttcctttagcaaacaaaagttcttaattttaatgtaatcaaatgtatatcttttatatctgatactatttaccttctatttaaaaaaactttacctcatgttactcatgcttaaaaagatattgttttatttttatttttacaagctttattgtcttacattaccagtctggattcaccaagcttttttgcatagcatttagcaccgcagctacctctatttactgaaattcttggtgtttcatctagcatattagtaggttacaggtaggcatatatttgaagggcaaaaagctgtcacactttcagattatgtttcatcagagcattttcctctctgtaattttatcttctatttttagctgctgtggctaaatataaatcaagtcttaatttcatcagcccatttttttctttcttgtacctaaaatttctaccttttctggatttttctatatcatgtagacatacttggatgttctttataatgaaatatgcattcatgcaaaacatccctcttctttcacactcctctccagctatttatcgatttcccctttctttcacccaaaactctttaaaataattgtgcgtattctctccggttaatcacttaccttcttttcacaacccattccattccagaccatttcactctaactgctcttatcaagatcactaaataccctcatattgctgaatttgcatggttgcttgtctgtcaatatctttattagtttctcagcatcatttgatgtagttttccatttctgctgcaccaaaatattcttcttttagattatatgtcacactgacattatgtatatttttaagccatttctttatccactcagtggatcattgcttttaacgagtaaaaagtaaacggagggaaccatcctaagaggctgttacagtaaaccgtaagagttagttttggacacaggcgctagggaaggataaagaaacacacacaccacacacacacacacacaaacacatacataaatcaggacagatttttttgttagaattaatagaactataaggtattatgagctagtgaatgaaagggaataatatttcaaactggcttaatttttagctgtgacaattgactgaatgtgggtgcaagtaactaaaatggatatttgggaaaggagaagatttagacaaattttgaaatttctcacttaagtacatcaagtagggaataggatgtataacttttgtggcatttgagatataattttgagagtccttggaagataatgtgaatcagaacaaagaacctatgggaataatatagaaagtaaagaaagagaaaccagagctgaacccttgcttcttccaatgcttataaataaagtcacaatgtggaaatgacagagggcattgaaaaggatggcaagaaaatgaataattttgatattcctgtaaacaaatagaatacttaaaaacatatgagctgtcttccatatcaaacaatattaggaagtagaataatattgtatcataactgaggtcaccggaatttgtcaacatagaaattattgatgatcaaaaaataattttatgacaagaagaagatgaaaattcaaagtggagtgttttgagaagagaatagtagattacaaagatgagagtaattaaaacaattacttaaagaagcttgaggataagccaggaaaatgtgttccattaattatctggcactttgaaaaattaagacacaatgaaagacagtttgggaataatacaaatctaaggaaaaattcaatttatgtttgaagtagaatatcaaaaatagactgaagaatggagacttttaaggtacatctccaagtacaaggaaagggagaaacattttgtaggtctttgtttctttgtgtggaccagagattgacttaaagatggaaagacattctttggctctgtttatctctgacatgtattatgtaaccctttagaatagctattggccgttagataaagtaggctgtagaatgaatttactcataactctctcctaattcacctcagaggattttggacctaacatcaaaactgattcacaaaagtctggagttaaatagaaacaatgactctgacaaggaaatatttccataaatatgagtacattttctttgatactccatgattttgactgccccaatccaaatcccagaaagaagccatactcctagaaaataataaagccggtcgtcaatcctctagggttttaggaagaggaggaggagaaggaaggggaaggaaacttacccaaccaatatatgagttaatgtttcaggataattttggtttatatttaaaggttcatctctttatttcttttctatcttatcactctacaccaaaaatgggtcaccatctatgatactctgccttgacgaagtattctgtctgaggtgaatctttcaagaaggttaaattttgaatgcatgtagtatgcactgacattttcatgagcctctttagctatcagatacatttaagatttttcttttcaatagtatacctgaatctgtattttaggtgtgggcttgggatagttgaaggccaacctatattctgaggttaatattgcctgcataacaaaagtcttttccatgcaaaagcatagcccagccatgttctgtactgactttaggagctaaacaccaagacaattaaaatataatgtcatgcatgcttccttgtcttttcacaaatgtctttcttgcatttggaagggctgggtaaaggtaggattcagatttgaggaatctaatgttatatatgtctacatgtttaatgtatctgcgttgattattggcacgagtaatattttctctatttcattattacaaactttaacaaaatctcatattgcatggctaggtttttatattttaaaatgatataataagaggtttttaattttttaacaataagaaaaatcccctttttattcaggggaagaaaataaatgctccctctggcttaggaatgagctaattatttgtcatcattctaaacaaatagatacgataatttaaatggtgtttcaaacgtctgcaaagattatcagcattcaaactaaaaccaaggcattttaatattctcatcagagccgatcagttaaccaaagtgggtcattagaaaataactagctaggcatttcattaatgcacaaataacccagaataatattcatagttttcacatttgcctaatgtgcatgtagaacacagtgttcaaacatgacttttttttactatgttactatcttaatttcagattgtattttaatgtatttatataaaaacactggggcaaggaaatgtaagaaacagaaaacaaattagagctgttcctttgattgtgtaacatcagggtcactagctctagctgtatatcaggtcttttctactttgactttggagcagatctctcattcctttgaatacactgttcttttggcagcaatgtcttcacactctcgattttcttcctgcctctctaacagctttttctctgtatcctttctgccttcacacctccataaacttgggaagtgaaaaccactcctgatgtctcttttttctccaattatattagtcatggtgttccagtgaaactaaacgaatactaattgcctgcataacaaaagtcttttataaatatagagagtgtgtgtgtgtgtatatatatatatatatatatagagagagagagagagagagagagagtgtatatagagagtgtatatatatataatatgtataatttttctatatctggattttttctaacatatatatgtatatatattagagtaccattagtttcagctgtgtcttgtaacctcttcagagtctattgggttcaatgtccccagagagtaaatttatagtctactggcaaagggagaagaacccatttatcagattgaatgtatgatagttggtatcatggatctaatctttgtttagacaaatttcatatggtttctcctgtgtagcttcataggcaccacacaattttagagatatttgggtcatctataataattcccaagacattctgagaatctcagccttatttttggtttctgatttcccactatgtctgtttatgtcttgtttcttttgtccctctgctttcctgtttccaaagcctggtttgtcttctctgctctcattgtcttcatcattttgatctatttattgtttgaaaccactattttcatgtaagcatactttttaaaaaacagtacatatatatgtatatatatacacacatatatacaacagtacatatatctatatatatagagagagaaacagattatagatataggtatggatatatacaaagagatttattatgagggatcagctcacacagatagatggatgaaaagtcccacaaacttccatctgtaagccagaggtccaagacaaccagtggtgtaggcccaatccaagtctaaagatatgagaattagggaagtcagtggagtaagtccaagtctgagcctcaaggcttgagaactagaagctccaatctttgctagcagaacaagatagatttctcagctcaaacacagagagagaactctcttttcccccgtcttttggttctattctggccttcaaaggattgaatggcgctcactcacacaggtaagcattgttttctttactcattctaccaatgtaaatgcttatcttttctggaaacagcttcacaaaaacactcagaaataatgatttaccagctctctgagtatcccttagcccagacaagttggcacattaaattaaccatcataccaataaaaacaaatttttgtagatttcatttcataatcatctaaaatttcacccacttttctctatttcacaagttaatccaaataaccaaaatcatttgtctggattatgataattgcagttattactggtttccctaaatgaaccatgcttctcctagccccacattatgaatatttattgagtaaaaatgtattctaatcattcttgtgctttttatactaagagggcttccaaccactttaaataaataatttccaaaataatctattacttggctatggttttatataatgatgttcccatgtaacttcccaacatgttttctcgtgagaaaatatggattgcaatccctagccaggctttacatactattttaaaaattctttccatagttttattttggctaaatctaatttgtcatttaagtagttgcttaaatgtgactttataaataaatcatttaatgaccactaagattgattgagtagccagagtagatggtctcatagtgtgatggttaatattgaataacaacttgattggattgaaggatgcaaagtattgttcctgggtgtgtctctgagggcgttgccaaaggagattaacttttgagacaatggactgggagaggcagacccaccctcaatctgggtgggcaccatctaatcagctgccagagtggctagaataaagcaggtgtggaataaagaatgtggaaggactagcctggctaagtcttccagccttcatctttctcccatgctggatgctttctgccctccaacatgacactccaagttcttcagcttttagactcttggactttacaccagtggtttgccaggtgctctcgggcctttggccacagactgaaggctgcactgtcggcttccctactcttgaggttttgggactcatactggcttccttgctcttcagcttgcagatggcctattgtgggatttcttcttgtggttgtgtgagtcattactctttaataaactctttttcaatagatacatcaatcttattagttctatccctctagagaacctcgattaatacacatagcatgctgcactttacattttataaaacatgtaacgcactccataacctatttgactgtcaccacactagagtgtaagccctaggacagaaggaatgatatattttgtacacgagtgcatttcaaacatcttattaatgcatactacatacaagaggactacatgatgaattagtatactttatcttgtaattcacttgattttggaagatgggcaaaattcaattgatgttaatcctcccattaaattaataactgtcctttttggtaagatatattatttatcccataaaaatcttcatttgttgcatgctttgaagaccttagaacaaagtaatttatcatagtttaaaaaaattggtagaacactataggagtaagtagaggggcattaattagactttctggaatgaatacatcagtttagggctgtttcattaaaagtatacttacatgaaaatagtggtttcaaacaataaatagatcaaaatgatgaagacaatgagagcagagaagacaaaccaggctttggaaacaggaaagcagagggataaaagaaacaagacataaacagacatagtgggaaatcagaaaccaaaaataaggctgagattctcagaatgtcttgggaattattacagatgacccaaatatctctaaaattgtgcggtgcctatgaagctgcacaggagaaatcatatgaaatctgtctaaacaaagattagatccatgataccaactatcatacattcaatctgataaatgggttcttctccctttgccagtagactataaatttactttctggggacattgaacccgatagactctgaagaggttgcaagacacagctgaaactaattgcactctaatcatgggaataattgtaaagtctatcttcagaacagaggtggaaatttctagacactttctgaaacaacctgtgagagcaatggtagccaggcttaaaattccacagagacaaaaggattcctctccagtaaaacttgtcagtttatgaaaagaaatgtgcagatactttcttggttgatatctttaatgtaagggtctggaaagatcattttccaataaaataaaaatcaagaagctcctccaatatacacagagctttcattcagcttaaagaccatcctactcttaaatatgaagagaaaaccaagactctgtaaacagtagcagaaaacatctaacatgaaccactgatatcaaagcataaagacacaaaagaaatctcaggaaaaaggaaaaggaagcaggaaaaagggaaatgtaagtaagtaaacaatatttatatcctagaagaaagaataacagagtatccatacaaaacaccaaaagactctacaaagaaacagtaagaaagatttcaacaggactttcaacaagtaatagaaaaagttgctaaactagttgaaagtactgaaagaaaagtgacatttctggcggaaagttaaaatatattttattgcaaatacatggaaaaccaagcaaacagaaaaaaatcgattatttattctagggaaaacataaattttacaagtaagagaatgaagtcacgatataataaatttgcatctataagtgataattatctagtctataatgttaacatctaatgctgaagtagcacaaaattatgatacaattatttttcaaaagttaagacaatgtgcacacccatgtgaagacagatataagagaggtaattgtatttttccttgttttcacataaaaatattctcaaggagacaagccaaatatatatatatataattatatttaaaaatataattatatatattatttatttatttacttttgtgatggagtctcactctgtcaccaggttggagtgcagtggcgatcttggctcactgcaacttccacctcctaggttcaagcgattttcctgcctcagcctcctgggtagctaggactacaggtgtgcaccaccacacccagctaatttttgtatttttattagagacggggtttcaccctgtcatccgggatggtctcgatctcctgaccttgtgatcggcccacctcagcctcccaaagtgctgggattacaggcgtgagccaccgcacccggccttacatatttttttaaatggagacaaacacaagaagaaagtagctaaagcttataaagcttctgcctctgcaagatggaaattagagaagtgagaaatgtgggagagtgctgttgtttttcagcatctgttgggtagaactctagttgtttaactatgaatatctgtatctccaatacaagtgcttgcaaacaaacaaaaattacatatggcccggtattctataaagctttgtgtacagaagcatatcataatatgttttattctaactctgagaaaacacatgataggaaatttaattctgcttgaatagtatggattggctcttttgtgttatttctttttctgaaattattttttaaaaagtaacagaagtatacatttttcctagatactatttttttttttttttttttttgagatggagtctcgctctgttgcccaggctggagtgcagtagcgcgatctcggctcactgccagctccgccccccgggttcacgccattctcctgcctcagcctccggagtaggggggactacaggcgcccgccaccacgcccggctaatttttagtatttttagtagagacgggggtttcacagtgttagccaggatggtcttgatctcctgaccttgtgatccacccgcctcggcctcgcaaagtgctgggattacaggcgtgagccaccgcgcccggccactagattactattatataaactggtaacctagtaagaatatatacttctgttactggtttttacaatagtaacctaataagaatatattttactattgtaaaaactgttttttaccatagtaacctagtacaaatacatttttacagatacatacacttaaaaattgcgatgccatgaattgaaataaaattaaaataaggtatatttctgttaatgcaaatgctactaaatgtaattgtatttaactctaatggtagtgtggtactatggaatcatgcttttttaagtataaaccaagacgttttaaacagttaacttattttttatttttctgtaaactctcttgatgcatcaatatgcattaagaaagttttactcactatatttgtgaatataatacattagcttttattataatttttgtaacagttgttagtaattactactcttcctttagacatcttccatttacaaacttgtcttatatttaatgactgaagtattgtacggtaaaatattattatacacatcaatataatcaatgtgaccattcttaatatgagaatctttccatttattagtgagtcagtataatgatgcttttgaataatcaaatgaatataatgaaaaacatcattagtgtatacactgagtggcaagaaatttacagaagtgttctgtatttgctaaccagttctgtagaagcagacatacatatgtatgtgtatgtgtatatatatatataaaaaataaatttatggagtttggtgcaatttttttaaatgcgtattttgcatagtggtcaagtcatgactttttgggtaatcatcacccaaataatgtacattatacccattaagtaatttctcttcatccaccttctcacccttctgggtctccattatctattattccactttctctgactatgtatacacagattttagtacccattaatgactgagaacatgtgattactttctgtgtctggcatgtttcactttagataatgacctcgagttttatccatgttactccaaaaatgtttgtttatttatttatttattatattttgggggacagggtttcactctatctcctgagctggagcgcagtgacatgaccatagatcactgcaacgtcagactcctgggctcaagtgatcctcctgcctcagccttgggagtagcttggactacaggtgtgaggtaccatcatacctggctaatattttaaattttttgtagtgacagggtttcactatattgcccaggctgatcttgaacttctggcctcaagtgatcctcctgccttggcctaccaaagtgctgtgattataggcatgagccgctgctcccggccatttttttcttttttatggctgaatagtaatccaatgtgtaagtataccacattttctttataaaatcatcaattaatggacacttattttgactcctattgtgaaaaggaataggaacaattgtgaataatgctgtgataagcattcaagtgcaggtaatttttgacatattcatttttttcctttgggtagatactcagtagtaggattgctggattgaattttagttctatttttagttccttgagaaatgtccttatcatttcccatacaggttgtactagtttactttcccatcaaaagtgtataagcattccttctctccacatttttgccaacatctgctatttttttctctttaataatagtcattctcactgggataaaatggtatctcattgtagttttaatttgcatctctttgatgattagtgatgttgaacgttttttcatatatcaattggctatttatatgtcttctttttaaaaagtacctattaagtttctttgaccactttttaacgcagtggtccccaaattttttggtactagggaccattttcatggaagacaatttttccatggacagggaattttggggggatggtgttaggattaaacgtttccacctcagatcatcaggcattaattaaattctcataaacaatgcgcaacctagatctttcatgtgtgcaattcataattaggttcgtgctccaatgagaatctaatgttgccactgatctgacaggaggcagagctcaggtggtgatgctcactctccaccgcccacctcctgctgtgccacccagttcctaagactggtaccggttcacagcccagtgaaccaccaggccaaagattggtactgcttcatagcccagggtttggggacccctgtattaatgggattattattattttttattgtttttgttgagctgagttccttatacattctggatatgagtctaccgttggataaataacttgaaaatattttcttccattctaccagttacccatcaactttgtggatcatttattttgctatacaggagctttttagtttaattaagccccatttggtgttttttgtttttgttgcttgtgtttctgaggttctagtaataaattctttgtccagatcattgtccaagagggttttctctcgatgttattctagtatttttatagttttaattcttacatttaaacctttaatccatctgtagttgatttttatgtatggttagagataggagttcagtttcatttttatgcaatagtaatgcggttttcacagcctcatttattgaaaaggatatccttccccaaatgtaagttcttgtcagttctgtcaaagatcaattgactgtaaatatgtggctttattgttgagttttctattcctgttccatttatctgtgtgtctatttttataccagtaccatgctgttttgtttactatagccctgtgatgtaatttgaagtaggatgcctccagctttattctttctccttaggattgctttgactgtttggctcttttttggttccacataaaattttggattgttttattctatttttgtgaaaaatgaagttagcattttaataagaattgcattgaatccagatttctttgggccatttagtcattttcacgatattgatttttccaacacatgagcatggtatgcttttctttgtttgtggcatccacaatttctttcatcagtgttctgaagttttcattgtagcaatcttttatctccttggttaaatatattcctaggtattttatttttaaagctaagtagaatatttaagcaaggagataaagatctattttatcttcttggagattaaaagagatttttgtttgtttgtctgagtcaatgtctcactctgtcacccatgctggagtgcagtggcatggtcttggctcactgcaacctccgcctcctgagttcaagtgattctcctgcctcagcttcccgagtagctgggactacaggcacgtgctactgtgcctggctaattttttgtatttttagtagagacagggtttcaccatgttggccaggctggtcttgaactcctaacctcaggtgatttgcctgctttggtctcccaaagtgctgggattagaggcatgaaccgccacacccggccaagaggttgtttttaatctcttggattactttcttgattttgttctcagctagatagttattggtgtattgaaatgctactgatttttgtgaattaattttaatttctacaactttattaaattcatttaacaaatctaagagctctttctggtgaaatctttaggtttgtctaaatataaggttatatcatcagcaaggtaggataatttgacttcctcttttctaatttggatgcctttaatcctgcctgatggctctggctaggacttccagtattatgttaaataacagtggtgaaactgggcatcattgtcttgttctagttcttagagaaaattaaattttccatccaatataatgctggttgtgggttccccagtgggaacaagaaccaaagaacaacactcatcctctcccatactaggggatcattcctggttcccagctggcctcaggcatgcaggctacctgttttccttacccttcctagattttggtgtatcctttcatttttctgttggtctttcatgtcacctcttgtaaaatgtattcaaaacatgattgcctgcacattatttttggttcttctaagtagatcaggtgtacttgaaatgcttctagtcagccattaaagaaaaaaactgcaactttttaaagttaccaatttacatattatactgtttttaagattacttattcactcaaatgcagctaagtgtattgctattattttgtgtctattaatgtttttattatttttcaatttaatgttcaaaagatatttatttttcttttgctcataagaattgtgtattatatattttacaacaggcatttagttagattaagctattgaccacatgcatatatcaatccccaaaaagtgataaagttatcgtagaggaattctaataggaatagagtatcaatgacaataaatcaattaaagagttagaatagcaattgtatatactatgacattaagaaaaacatcaagtatagctagaggaccaggaaattcagtatctgattatttatgatattcagagagataacaaagaaaacaatataaacgctattattaaagaatggggctgggcccagtggctcatgcctgtaatcccagcactttgggaggcccaggcaggcagatcacgaggtcaggagtttgagaccagtctggccaacatggtgaaaccccatctctactaaaaaaaaaaacaaaaattagcaaggtgtggtggtgcacgcctgtaatccaagctacttgggaggctgagacaggagagttgcttgaactcgggaggcagaggttgcagtgagctgaggtcgcgccattgcactccagctctgggcgacagtggaaggggaggggaagaatggtatggagtataatgaagagtgttagaattagaaataattgatatatagatagataggaagacaagtatagatattcagatgcaaacttgtttttagaaatcaacagacaaaaatctgagaggaaaaaatcttgcacaaaacaatttataaatggtgtgaaaaaataaaaagagattgattggtttaatgaagtctggaaaactgagtctatatcttggaatatatttgattacaaaagccatatgataataaaataaataatcagtagggtaagaactgaccagatgcaaaagacatttattaagaaaagcaaactacggcccttctttatattttaaggatgcattaaaataagtatgtatacacaaaagactaaaggatccagatagaattagcatactggctgcaggtaagtactggaaggcagaatccagtcaaagtaagagaaagaacaatgtcttcataaggtttctataagtatataaatacaggccagagtttttgagatctgtgattttcctgacttagtacttctcaatatgaagttgggcaagttatttttataataaaccatatcattatatcatttggtcacttcaactgtcttataatctatctacatcagtgtatggtgacaatcatgaactggaaaataatcaggatcccttttccattgtttctctatatgattgttctgatactgaaattcctcattcgttgtgttgtttggattattatttctgctgttgccctcctctggaatcctgagctcattggtgagtgccactgaacccatgtaccaaaaaacaaacaaacagaaaggaaagcttttggttgagtaaaacaaattcctaaagtaatcaatatttccaacacgaaaaatgaaggaaggaaaaaaaagacctgcatcaagttatgaattggattataaaatttaaaactccacaaagatagaaagatactaactgcaccaacagaaaataaaagtagaagtaaaccaaagcagactaaggctacatagatgtgcttagttgatcaacatttaccaagttacttacttcaaaaatgtgcacattttggcccgtatattgcccttcaataagttataataataatagaaactcataagacagttcaaattaaatatgccatcaatgcatctcggcagcagcactacacaactgcctgagtacaaattaatttttacctagaattccacacccagctaaataattaataaaataggatattaaaatagaagtatttttattctaagcatttggagattttcatttggatctactttctttgcagagagttaattaagaatgtaccctggataaataaggacagagaaagagaaggactatgtggtgtgtggaaaattttggataaactcacgaatgtcctaaaggaaagttcgggatgagaactatgcagaagtgggagtagtcaatatcagagtagagggactgtgggttctgggataacgcattgtcgagatgttaggaacaaatggtgtgtgtgtgtttagggatggatattaataaacctcctggtaaaatggattacttaaaaacaattttttttgtatttttagtagagactggtttggccaggctgctctgaaactcctgatcttgtgatccgcctgtctcggcctcccaaaaaatcagctgggagtagtgacgggcacctgtaatcccagctactcagcagactgaggcaggataatcgcttgaacccgggaggcggaaattgcagtgagccaagatggagccactgcactccagcccaggtgacagagtgagactccatctaaagaaacaaacaaacaaacaaaagaggataccacaataaaaattgatagtagaaaaaagtgattagagagtcaagagaaaatagaattcatgtaagaactatagttggatttagaataaacagtttattttgtcttagatttctggatgtcataaactcactttttccttcatctaacctctcatacaactaaataccctggaaataatttttaaaacaagaataccatagaaggacttcaagaattgaaaagtagaagacgactagttagcaagctcagaacttgaagaatgatactgtggtcaaacaataaaattgcttttgttcatttgttttatctcccattttatctccatatatatcaaatcaagcaccacagaggcctcctaccaggaactaccaataagaatagataaaatcaaaccaacaaacaagcagacataacaaaacctagacaagtctagactcttcggccaaagtattggaaacaaaaatgtccagtggagatctagcagggagaagcaactcaagacccacaacctatggtaactatgagcttgatgatccacagagactggtgtcagtctcactggcaaggctgacctaatcccatgtgccacagccaccagcagagatgactgatttgttttagaggtgacatcagcatggtcaagttgaaccaatgctttactcatcccacactaaccaaccatgatgggccccatcagtcttcagctagagagtcagtgaagtctgagcaatggcaggctttgtctatcttcagtgcggtgtcaccaaaggcaagatagggtgacttttcttctatccatcacacaggaaatgtggtgtgatgcctaccatgtgagtcagtgaccctagatagagagaaccatgacctgctccatgagaggcagaaataggcagaacccttggcctgcatctgcattactatcaagcctagttactcttggcccaccactctgtggcagaaggcagcataagtccagcaccttccacctctctaacttacagcaacaggtaaactaagtcaagtgtttcatgatgctccacttaattacagagttatctagatgcagctgttcctgaccattcatttagcaacagaagaagaccaaggccaaacattttcctcctcccaacacctggatcaggaaacagctaaagtggtgcttcttctccctaaagagaatggtggagataaaataggaagctaggagcatccaacagttggagaatagaccaacagacacactctgttctgcaggcccaacatctacctcccacccccgcccccaatgtagcaatacctggtggcctagggaagaaccttgctaccaaggtagttggaaccagaatagattcagcaagtgttgcagcaaagccttcagtacaaagcagataagaatatgatgtcaggagctcagaatagtaaattggaaccatagcctacagagtattctagaaagtacacactaaacctaattaaagtgattgcctattaggagagatatacataagactcatattctcctaatgtactttataaaatgtccaggatacaaccaaaaaccagtgatcatacaatgaaccgttaaatcacaacttcatggatttaatggttcataaatttgcttcaacaagcgattataaatttttattgaaactaaagaaaaaatagatattctcctcaaataaattaaagttatataagaatgaactaagcaaaaattatagacttgaaagttgcaagtaacaaaacaaacatacaagactcttggataagatccatagtagattggagatgagagagaacagactcagtgacgttgagggcagatacaaaatttactcagtctgaacaacagagaggatatagcctgaaaaagcaaaaagcacagaggctcaaagacctctgggactataacaataaatctaacattttattgttaatattattagaatcctagaatgatggtagaaaaaagcagggctataaagttattggaagaaataagaactaaaatttcaccaaatatagcaaaagacataaatctataaatttatgaaactgagagaaaatcccaaatagaacaagtccacagaaatttatgccacaccatgtcattattaaacttctagaaaggaaagacaaagataaaatcttggaaacagcaagagaataatgatctcttttctataagaatacataacttgaatgacaatggattttataccagaaaacatgaagatcagaaggaaggaaaacaagaaaccagactggcagagtgagaggtgggagaaaccaagaatttgtcagaagaggatatatctttaaataatgacaaataaacctctctacaaagaaaaaataaataagggaagggattgtatcttcataaaggaaagaagaggaaaataataagtaaaaatagaagcagatatcagaattctttcctctatgactttcttaaattatattttatatttaaagcaaacattatgacatataatgtgttaccagctatacgtagtgtaaatacttaagaaaattatatttaaaaattaggaaaactaaagggatctaaatcagagtttactacttctactgaagtattaaaacatgtataatgtagtctgtgtttttacacatatatattgtgatatctagagaaaccactaaaaaattatataagcaatatgattgaaaacactataaattaagacagaacagtaaacatatctaggcaatctaaaggaagccaagaaaaaaaaaactctcaaaactctacaataaaaaaacaaccaacctgattaaataatgtgccagaagccttgccagacacctcaccaaagaggatatagaaatggcacataagcatatagacagatgctgcacatcacatgtcattagagaaaagcaaattaaaataacaatgaaataccactacaaatgcattaaaattaccaaaattcagaacactgtcaacaccaaatactgacaaggatgtgcagcaataggaatgctcatttattgctgggggtgggggtgcggcaaaatggtacagccacttttgaagataattatacggtttggccttgtccccagccaaatctcatcttggactgtaatttccataatccccacatgttgtgagacggacccagtgggaggcaattgaatcatgggggtggttacccccatgctgccgttctcgtgataatgagtgagttcttcacgagatctgatggttttataggggcttttcccacttttgctcggcacttttctttgctgccgtcatgtgaagaaggaaatgtttgcttccccttccaccataagtttcctgaggcttccccagccatgccgaactgtgagtcaattaaaccttttccttttataaattacccagtctcgggtatgtttttattagcagtgtgagaacagactaatacatttggcagtttctgacaaaagtaaacgtgcgtttgtcatatgaatccgtaaccattgagttgaaagcaaccaaagtgcccttcaatacatgaatgaataaataaactgtggtatattcagactggaatattattcagcattaaaatgaaatgagctatgacgtcatgaaaagacacagggaaaacttaaatgcgtattactaagttaaagaagccagtgtgggccgggcgcggtggctcacgcctgtaatcccagcactttgggagaccgaggtgggcagatctcgaggtcaggagatcgagaccatcctggctaacacggtgaaaccccgtctctactaaaaatacaaaaaattagccgggcgtggtggcgggcacctgtagtcccagctactcgggaggccgaggcaggagaatggcgtgaacctgggaggtggagcttgcagtgaaccgagattgtgccaacgcactccagcctgggcaacagagggagattccgtctcaaaaaaaaaagaagccagtgtgtgaaaaggttacatactctactatttcaactttaggacattctggaaaaggcaaagctatgaaggcagtaaaaagatcagtgattgccaagggtggggagggagaaaggtatgaacaggtggagcacaaaggatttgggggcagttaaaaaaaaaaaaacaaactacgtgtgctgctatataggtagatacatgtcactatattttgtcccaatccatagaatgtataccaagagtgaaccctaatatcaaccatgattttgagtgattatggtgtgtcaatataagttcctcaattgtgacaaatgtaccatgctgatggaagatgttgataatgtgggagccatgcatatgtggagtcagtgtatatatatgggacatttctgcaccttcatcccaatttttctgtgaacttcaaactgctccaaaaaaagttatcaaaacaaagaagaaatgtactaagaaacagaagaaacacagagaagacaaataataaaatatctcagatctctcaaaactaagatgtaaagaacaaagtacttgacagtttttaaaaatgagaacatgaaaaaatacataaaaagttgtttttcactgaggaagatagcaagtgagcataggaaaatatgtttcacatcgatagctattaaatcaacagaaataaaaaacagatgtcaatactcacttttcacaatggcctaaaaattgcgatgacatcaaaaactgatgaggatgtgatgtaattgtatcactcattcatttctggtgaaattggaaaatagtaaagatactctagaaaattatgtagcagtttcttttaaaactaaaaatacatctgtccacatgacctagcaatagcagtcatggacatttattaccaaaaaataaaattatgttcacataaaagctgaatacaaatatttatagcagccagaatttgtaatagccagaatttgggaataatacgtgtatctcttaatgggtaaatgaaacaaactctgatgcattcgtgtcgtgcaatagtactcagcactaaaaataaacaaatcattaataaattttacacgtatatcaacaaagctctgctgtgtgggaaaaaaaagccagtattaaaatgtcacatgctgtgtgattctatttatataacattcatttaaaaaaaaaagttgctagtggttggggtgggggcaggaggtaaggatgactggctatgaaagggtagcatgagggtatctggagatgatggaaaacttctgtacgttaattttggtggtattttccaccattttcttctttccagcacagttcatggcacaaatgagataggcatccaaaatatatttgttgaaatgacagttctatgtactagttctttatctgtttcaactagtctaatacatattcagtggctagtatataaagtaaacacctattgcaacatcatggcatattttgcacaccaagatataaacaccaagctatttacttacatagagaaaggttccttgctgctctgcttatacagaagaaaaaaagaaaaccataatgatattcaaggaattatctaatgtgctgtacatactttgcaatacaaattgagtacattgttttccctaaaaatgcaacctcaagcagaaaccttaacagagcatttacattattgaatccttgttattaacaaataaaacatgtattcattcactgaagctgtaagataccacctctaatttattatttaactcatttaagtaaaaagtgtactatatatacatacatacacacatatgtacagtctcagtaacactaattggaattccaaatgtatctatctgtccataaatataaatatgaaaataaatatattaagtattaactgaatgtacccagttatatcattaaagattatttaatgggaaaaaattagagccagtaatttttgagaaagaggctgtatctcaaaaaccctgcagaaaaaacatgaagttaacctaaatgtccaggcatgctatgcaatttaacattatgacacttcaaaaatgacggatagaagcttatatagtataaaggggctgcaatggttaatttttttttgtcagcctggttgagctatgatgctctgatattggatcaagcatcattctggatgattctatgaagttgtttttttgataagactatcatttacatcagtgcactttgagtaaagcagattgcccttcataatgtgagtgggctttatctaattgaaaatcttaatagaacaaagactgaccttttccaagtgaggataaattcagccagctgactgcttttgaacacaactgcaactctttcctaagtctctgccctgcttaattttggccttaaccaagctttcacaattacatgagccaattctttgaaataaatatgcctctgtatacacattctttggttctgtttctctagagcaccttttgactaactaatccagggacttaagagtaaactggttacatgtgtagacaaggctgttagaaaactatagccaagttgtgttccaacagagagatcaacattctaaatcaccttagcacctgctaacatcatagctgacatcattttcaggtttctcattatcatatcggagtgtcggtggaatttgactaaatatattgtgtttaaaaaatattgaattcatgcaaactatgtgggtaaatatatagaagtatttgaaattcaaacataaaattataaagacaatcaaactaatgagcattgctaattactaaatttggttttattgcaaatatgagttgaggcccctttgattaactaatagtaacaattcataattaataagcatggtaatatctattgagtgttagttatgtatcagaacataagttatgcatttaatgttcatttaaaaaaataatgaaaagcactctctgaggtagatactattggtaatatacatatgaggtaacagtaagtgactggactggaaagtaagtccaggtctgtttcactacagagacccagagccagaaacctcaaccccttggctaatagtctacacaaagttgttcacagtcagtggctctataatagtcattcagcctcaccagtttgtttaaatcttcagttcacattaatacatttggaaatgtcagactacaattttcattttcaattatgctaaaatatttacatgccaaattgactatcacttatgtccctcaaaccttgccacattgtagcatatgataccagagccctgtattttcaagactttcaaaattcagctcattcttatgaaaaatgatgcacttactgtactcttctgtatataaacataatgatctgagtacagaatagatagataataggtagatatatttttatgtaaatttgatcttttattttgggtgagacataatctagcattgttttactaaacaaattttactaatgattgacttgaaagacaatattgcaagaggctaagacacatagtctttggagtcagaatgtttaggaaagtttcttagcccctcaactttctatagctgtgtgaacaagttcaagtcacttaactcttggggtctcagtttctctgtgtgtaaaagtaggatggtaaaagtgtctacctcaaaatgtttgtgtgtagttcacatgtgtttatatttataaagcttttagaacagtgtctggagaatcataaactcggtttaaacatttggtttaaacactctcattttaaataatagtcatattatttaaatatataattaaatgccattctatattctgtagtttaaatttttaagcaatattttgtccaatatgatatctggctatttcgtccaagttataaactatgtacctcttggccacattcagttttctgtgcttgcttagtcagccttttaagccaacctcaattgcaggcagagactcagccatctattatgttagctgtgttattcagcatcagttgtcaatggatttctgatgtagatagaagtttttgtgtaactgagatatcactttgacagatgaggtcacaatagttttaactgatgttgtttcaaacctcaggaacacttgcttacatggtacagctgaagcatttcaaaagcaacgcaggatacctagtagcctaaattactctacacagacacacatttttttaaaaatgtttcaaggtttttaacaagctttacaaattgacaaaagcaaaatctttttaattaaatataatgtttttaatgaatagtttgaaagggctagacagcctcagtacaataaaatgctgtctttgaagtaatttccattcatttgaacttgaattgaaaggtattaaatccagcctctttgtagactgcaaattaaattaaattaaaagcatcttaatgttttaaatagagttcatgcttacatgtttaaatgcttagaaataaaatagaggtgaggcagagtaaaatagatgaacagagaaccctccagcaaccttcccctgcacaagaacactaaattgaataaccacccacacaagaaaacacctccacaggaaccaaaaatcaagtgagcaatcataacacctagttttaacttagtatcaagaaaagaggcacggaggagggaagggaagagagccttaaattgccctgttcccatcttttaacagcagcagtggtcatgtgtggtgtggagagagaatctgtgtgttttgggaagggagagtgcagtaattgtaggacttggcattggaattcagtgctgctctgtcacagtggaaagcaacatggggcagaaatttgctggcacccatagagggagcatttaggctagccctagcacgagaagaattatcactcccagtggctggaattgattgctggttaatctcaccactgcaggctaaagggctgtggagctctaaataaacttgaaaggcagtctgggccataatcacagcaaaatatttcaaggcaactcctgatgctgggctggccttggagcaagtgggcttggattgcacatgaactagtgaggcaccagctggagcaggcaaggcactgcttgcctgacacctcccacagccccaggcagcacagcttgcagctctgggaaagactcttccttccatttgagaagaggagagggggaaagtaaagagcactttgcctaacaacttggatacctgctcagacaaagtaaattagggcatcaggcagagtcctgaagccctcatttcaggccctagctcttggatgccatttctagacaaccctgggcaacaggggaaatgactgccttgaggggaaggacacagtcttggaaggatttattgtctactgactaaagagcacttgaaccttctataaatatcagtggtttccaggtagtactcacggcaggccttgggtgagacccaatgctgtgctgatttcatatgtgatccagggcattcctagacatagtggccatggagagttactccgtatgtttgaggaaaggagaggaaagagtaaaggggactttgtctttcagctcacgtacgagctcagccacagtgatgtagaatatcaagtgggctcctgggttccctgatcccaagccttggctcctggatggcatttatggaccagaccttggccagattggcaccaaactgtccttaaaggaggccttggagtattcagtacaagctgactactgagcccttggtccttgagtgaacactggcaccagccagacagtagtttgtattccctgcttgctcatgggtttccttcctttagaagaatagctaattcatgctgggcttaatacctagatgatgggttgataggtgcagcaaactaccatgacacacatttacctatgtaacaaaactgcacatcctgcacatgtaccctgaaacttaaaatacatttttaagtgataaaactatggccaaaaaaatccaaaacattgaaataatatcaagtaattttctgaccacaatgaaatgagacaaaatcaataacaagagaaatattagaaactgtatgaacacatgaaaattaaacattatgcttctatatggccagtggatcaattaagtaatttagaagaaaattttaaaaaattacaataaatgaaaataggaacaagcataccagaaccactgaaatacagcaaaatcagtactgagaggaaagtttacagttttaagcacctacatcagaaaaaatagataaacataaagaagacatcttaatgatccatcttaaataactagaaaagaaatagcaaaccatacccaacattagcaggagaaaagaaatatgattagggccaaaataaataaagttaaaataaaaaaatacaaaggttaatgaaagaaaattaaaaaacaaagaaattgacaaatctttagtcataccaactaagaaaaataagagaggagacccaaataaataaaatcaaagatgaaaaaagaaacattaaaactgatactgaagaaattcaaaggatcattagagacaacaatgagcagatatattccagtatattggaaaatctagaagcaatggatcaatttctagacagaaacaatctaccaggatttaaccatgaatgaatccaaaaccagaatacactaataacaagtaatgagtttgaaactgtcgtaaaaagtctatcagcaaagaaaaacccagaacctgatggattcactgctgaatattacaaaatatttaaaaaagaaccaataccaatcttacttaaaagattctgaaaaatagagggaatacttcaaaattcgttctatgagaactgataccaaaaccagaaaaagacatatcaaaaaaaaaaagaaaaatatggccaacatccttgatgaacattgatgcaaaaaatcctcaacaaaacactagcacaccaaattcaactacatgttaaaaagatccttcattaagacaaagttgaatttatcccacgaatgcaaggatggttcaacatacacaaatcaatcaatgtgatacatcatatcaacagaatgaaagataaaatccatatgatctttacaactgatggttaaaaagcatttgatcaaagttgacatcccttagcaataaaaacccaaaaaaaactgggtgtagaaggaatatacctaaatataataaaagccatgtatgacagaaacacaactactatcataatgaatgggaaaaaatgaaaacctttcacctataatctggatgtcccaaggatatccactttcactgccgttattcaacatagtactggaggtcatatctaaagcaatcagacaagagaaataaataaagggtaaccgaactggaaaggaagatgtcaaattaccattgtagatgatatggtcttatatttggaaaaatctaaagacaaccaaaacactaatggatctgattttaaaaattcagtaaagttacaatatacaaaatcaaaatataaaaatcagtatcacttttatatgccaacagcaaacaatctgtaagagaaatcaagaaactaatctcattcatctacaatcactttagagctttaggtaaagaaagatcagggtttttaaggaacaacggttagtatgatgtgagcataatataagtaaaaaagagagtatgaatttagaaagttaggcacaatgattgagattaacaataaagaaaataacgttgtcaatgaacgtaaatacatatattagtaatgtagaaagaacacatcagttagacttagcagttaatttggtacggtgaaagaatcaggggtatttatataattagtatgtcttttgcttgacaaatgatgttttcattccctgatatagagagtttgtgtgcgtgtgtgtgggggcagggggcaggatttatagcaaaagagtgatgaaatgcctgaaacacatttttaaagcattaaaaatgataaaatatatttcaatttactcacttctttaccattttcagccctctttactctttggtgaagatctaaatatccttccagtgtaattctccttttgtgtgaagaaattcctttaaaataattctcatagcacaattctgaacataataaatttttgtggattgaattgtgcccattgaaaattaaatgctgaagtactaacctccaatgggatggtactggaagatgaggcctttgggatgtatacacaggcctacctcattttatcatgcactgctttattgcacttcatggattttctgtcttttgcaaattgaaggtttgtgacaatcctgcatcaagcatgtctattgttgccatttttccaatagcatgtgctcatttacattatgtctctgtgccacattttggtaattccactacttttctaaacttttaaattattattacatctattatggtggtctgtgataagtgaattttgatgttaccattttgttttgggttactacaaactgctcccttataagattatgaacctaatacataaatgttaagtgtattttgattgtataaccagtcaacaattcaccatatctctttctctcctgggcctccctatctcttgtgacataaaaatattgaaattaggacaaataataactctacaatggctttgaaggattcaagtaaaagaaagagttgcacaactctcactttaaaatcaaaatcttcatcagtgattaagcttggcgaagaaggcatgccccaagacaagataggtcaacagctagaacttttgtatcaaaatattggtcaggttgtgaatgcaaaggaaaattttttgaaaattaaaagtgttggctgggcacgatggctcatgcttgtaatcccagcactttgggaggccaaggcgggcagatcacgaggtcaggagtttcagaccagcctggccaacatggtgaaaccccttctctactgaaaatacaaaaatgagttgggcatggtggcacgtgtctgtagtcccagctactctgtaggctgaggcaggagaatcgcttgaatccgggaggaggagggtgcagtgagccgagattgtgccactgcgctccagcctggccacagagcaagactctgtctcaaaaaaaaaaaaaaagaaaaagaaagaaaattaaaagtgttacttttttgattgcatggataagagagtgacaagccttttatgctggatcaaaagacaaacttgtaagccaaatcctaatctagagcaaggccctaactctctttaattctataaaggctgacagaggtaagaacatcacagaagaaaagcttgaaggtggcagaggtcagttcatgaggtttaaggaaagaagccatctctgtaatataaaactgcaacgtgaagcagcaaatgctgatgtggaagcggctgcaaattatttagaagaattagttaagatacttgattaaaggggctacactaaagaagaaaatctcaatctaggtgaaatgaccttctgttggaagaagatgccatctagcactttcactgctatagaggtgaagtcaatgcctagcttcaaagcttcaaaggacagactgacccttttgttaggggataactcagcttctgacatcaagttgaaatcaatgctcattgaccattctgaaaattttaggtcccttaagaattatgctaaatctactctgcttgtgttccctaaatggaactgaaaagcctgcatgacagcacatctgcttacagcatgatttactgaatgtttttagcctactgttgagaactactgctcagaaaataagattcctttctaagtattactcctaattaaaaatgcacctagtcacccaagagctctgatgtagatgtacaaaaagatcaatattattttatgcctgcaaactcaatatcagttctgcagtctatggagcaaggagtaatttcaactttcaagtcttattatttagaaatacatttcagaaggctatagctgccatagatattaattcctctgatggacatggaaaacgtaaattgaaaccttctggaaagaattcaccatctagatgccattaagaacatttatgattcatagaaggtcaaaatatcaacattaaaaggaacttggcaggattttaactctcatggatgactttgagtggtttaagacatcagtgggggaactgcagatatgacagaaatagcaagagaactagaattcaaagaggagcctgaaaatgtaattgaattgctgcaatctcatgaataaaatgtaaatggataagaagttgcttcttatggatgaacaaagaaagtggtttctgaatatggaagctactcctgatgaagatgctgaaaacatagttaacatgaccacaaaacattatatcacacaaatagttgttaaaacagtgacaagattttagagcattgaatccaattttgaaaaggttctactgttggcaaaatgctaccaaatagcatggcatgcttcagaggaagagtcaatcgatacaataaactttattgttgtcctattttagaaatttttgatagtcacccaaacttcagcaaccgccaccctgatccatcagcaaccatcaatatggaggcaagactgtccactagcagaaaggttaaaactgctgaaggctcagatgtttgttaccatttattagcaatgaagtatttttaattgaggtatatacattgcttttttagacataattctactacatataatagactacaatattgtgtgaacattactttcatatgtattgattaaccaaaaatttatgttactagtgttattgtgatatttgctatattgcagtggttggaagctgaacccataatatctccaaggtgtgtctgtaattgggtttagaggagttcatgagggaagggttctcatcatggtattagtgttcctatagaaacaaagcagagttttctcttttatctgacacttgaagatacaatgagaaggaagcagtctgttagctaggaaaataattctcaccaagaaccaaattgcctagcaccttaatcttggatttctcaccctccataactgtgagaaataaatgcctgttgtttaagcaaaaaaaaaaaaaaaaaaaaaaaaaaaaagtacatgttttagtaatgttgagtctcttccttcttatttctcttcctgagtctctaattcctcttattttagactgcttgataatgcctcacagatcactgatttcctgttctatgtattttctctctgtccttaactttgaataacttttattattatatgctcaaggtcagcagtctttatctgtagcatggtatctgccattttttgtatctagtgtcattttaattccagattctgtagctgtttttaaattttaatttaatttaattttaaattctgggatacatgtgcaggatatgcagatttgttacataggtaaatgtgtgccatggtgttttcctgcacccctcaacacatcacctgggcattaagccctgcatgcattagccatttatcctgatgctctcccttccccaactccaccctctgccaggccccagtgtgtgttgttttcctgcctgtgtcactgtgttctcattgttcagttcccacttataagttaaaacatgtggtgtttgattttctgttcctgcatcagtttgctgaggataatagcttccagctctatccctgttcatgaaaagcatataattgtattccttttaaggctgcatagtattttgtggtgtatatgtaccacattttctttatccagtctatcattgatgggcatttgggttgattccatgtctttgctattgtaaacagcactgcaatgaacatgcaagtgcatgtagctttatagtagaatgatttatatcccataatcagtaatactgttgctgggtcaaatgggtgtttctggttctaggtctttgaggaattataatattgtcttccacaatggctgaactaatttacattcccaccaacagtgtaaaagcattctatttctccacagcctcaccagcaactgttgttttttgacgtttcaataatcgccattctgacttgtgtgatatggtatctcattgttgttttgatttgcatttctctaatgatcagtgatgttcaactatttttcatgtttgttggccgcataaatgtcttcttttgagaagtgcctgtccatgtcctttactcactttttagtgggttttttttttcttctaagtttgtttaagtgtcttgtggattctggatattagacctttttcatattgatacattgcaaaaattttctcccattctgtaggtagtttgttcactctgatgttcatttattttgctgtgcagaagctctttagtttaaataagctcttcagcttaatgtgctatattttttacctgtatgtttgccaatttagcttttgttgcaattgcttttgacatttttgtcataaaatattttcccgtgccaatgttctgaacgaaaaaacagcctgtatagacaagacaattctaagcaaaaagaacaaagctggaggcatcatgctatctgaattcaaactatactacaaggctacaataaccaaaacagcatggtactggtacaaaaacagacacacagactaattgaacagaagaaagaactcaggagtaagaccacacatctacaaccatgtgatcctcaacaaacctgagaaaaacaagtaatggggaaaagattccctatttaataaatggtgctggaaaaactggctagctatatgctgaaaattggaactggaccccttccttacacctcatataaaaattaactcaagatggattagagacttcaatgtaaaaccccaaactgtagttttaattatgaggcattttctttgagattttttttcttttctttctttttttggtttttgagacacagtcttgctttgtcacccaggctgcagtgcagtgatgtgatcttggctcactgcaaccttgcaaccttcacctcccgggttcaagcaattctcctgcctcagcctcctgagtagctgagattacaggtttgtgccaccacacccggctaatttttgtatttttagtagagaccgggtttcaccatgttggtcaggctggtctcgaactcctgaccttgtgattcgcctgcctcagcctcccaaagtgctggtattataggcatgagtcaccgcacccagcctccttttcttttcttcacatgttcatatgtaccctaccttctggaacataagaagaaacacatttataatggttattttaaagtaatttcctgctagctccatcctctctgtcatgagaaatgtgctatattttttacctgtatgtttattagaattttctgttgtttgcataattggcaattttggattgggtgtcaaatttattgtattatttgaagtaatggtgttttgtgttttctagttttttttttgggacatgcaattatttggaatcaatagggtcatttcaaggtttactgttttctgaaattaataaacattacatgtagacaagttttaggcttacaatttttattagatacactataatacagattaatccaagaacatttttcttattaacttctgcacagaatcctagagagcaaaaatccaatttacaggggacaattgagaagaaaatatctcactactaaaaatcaatttgaccttaaaaaaaactgaagtctatctctttaaaacttaaatgttaccaataaaattgtttttaagggaaaataagatagcattaacacaactaacttggacattcaaagattaccaaagtggattgtaaactcaaataatcagatagaaatctaataagttagcagaatctggagaacaataatgcatacatgcacagtttttctatgaattaccagaatgctcactgttatcctttcccaatacttattttagaccttttgaagatggttattgtgctctattataagataataaaacaatcagtaatgacatatgtaaatgatatcttccatttttttcctttcttgacatttacaatatattattaatcagtaaaagttctctgcaaaataaattatgttttaagaacacgttttcagaaaaaaatagcaaacatgtcttatcttaaatgattagataagatttttatattttgatttagtcatatttaaacatagtatgaaaaaaaatttacactgctacccatatgtctgtcatgcatgagaaacaatacctgtacttttctaatacaacatgcattattttttattccacatagttaacttatctatatcatgtatatgcacacatatatatccataatacattcatagtgattgtacatattttgtacatgtaatattttgatacatgcatactataggtaatgatcaaattttggtaattgaaatatccatcacctcacacatttatgtcctagttttagcaacattttcaaatcttcccttctagctattttgaaatatacagtaaattattgttaactatattcatgctactgtgcaatcacacactaggacttattccttatatttaactagctttttgcatcctttaactaacttctctttatctctcccttccttctaccctttccaacctctggcatccagtagtcttctctctgtctccatgagatcaccttttttagctcccacatatgagtgagaacatgcaatatagaagtgagagctgcaacccactaaattgtctttatgacgcactaacagtttatgacgtacattatgaaaaaattactccatgcagccctctaaaactgaatataccaatgcaaagcaactctgactcacaatcattggtaaatgggtgtagtaattgccaaatattacatatcattcactaaataccagacacatttttaagcactcttcatatatatcttcttataataaatcttataagcctgtagagctaggcttcagactctgagattttaatagtgtttcataaagaaagtactttaacattatgggtcaagtagacccagaactttttgttttaaattgacagataaaatagtacatatttattgtacacaacatggtgtttggaatggttacatctagcttacatgcattaagaaatgcattacctcatatatttttcattttttatggtgagaatacttaacatccatttcctttgcattattcaaaaatacaattcaccatgccatacaattgatatcttgaatgtattcctctttaactgtagctatatatttgaccaatatttccccaaccttcccctcctctaactatcccagcttctggtaacaacctattttctacttatgtgtgcctctgaatttttaaatagtacattttcgtattcagggccattctcttattgctaattttcagaaatgcttactgattttttccatttttttcaaaatgttatatatagctgacatagaaaagcatatatttcaaaagagaggagaaacaaaatatatttatttgtatatttggtttttagctttaatatcaagcacagactgttataattgagaacttacagttcttcagggagtgattgcattttatttagaacacgggtgaacataaaaattatagttttataagttaataacttgcataaatggtttaaagaaggcatggaagattgatttcatgggcatttacctagcaaccagatgtcatgtatgtgtatctaaaatgcctaaaattgtggtcatattgaattatgtgagcagtctttcatcagacaaatagacgttattaaaagattaaagaaagttgtgtttccagaattggcactgcaattacatttttttttttttttgcttaaacaagaaactattatttttccgaatagaatggggaaatgtttttgtagtttgttattaattttaaaatacaagcaagtacataatatatccatatatattttcacttagcatgttgtttggatgtcttagggctgtcattgaaaggcatttctccatcacccactacatatttccaggcatcctaaggaccacctctgtcatcttatctcgatgctttaagagatatttactaatattactcccaagagtgtctggaagaccctccagataatctctttcaatagcatcattctggagatgggtgagcaggaaaaagaagctccagaccattaagcaagaaaataacttccagaaggtaatagatatcttgcattccaaacattttgaataccatctctgaatataactagctcttttgtctctttctgttcctagcctctcacctcactgtttgccagggtttccataagattatactggagcattctccagcaaaggaatataaaattatgttcatattctgttttaaacttacagatatcatctcacttgatcttaaacatagtcctgtgcctgaggtgttattatctgcattttataagggcagcatggagaattctttgattgatacttcaatttgtttgttgtactatttatttttctatggaactgagaaactttgggtggactagctttcctgaaaagcagtgtcatctgcaaacactactggagaggggaactaatcaattatacctgtagtagaaattagcagctatacatggcagaattagtgcactaacgggctaagatgaaagctaaagtttcctctctgctatgaaaatagtccagaagatttttgtatgtaggacatcattaacatttgattaaaacctgtgataagtaacctgtaataggtaaacctgtagtaagtattattgatgcctcacattacataaaaacgtaatatgttttcctgtttgttttatattttagtattaataactaagaagaatcttatatatgtttcataagtaaaatgcagccttaactagaaactttaatatggctagtactatttatgataatatttactaagaaacaaatgtgagatgataaaatgaaaacatcaaaaactttgtgatagttctagactggtgtacaggctctagatgcctgtaatcccagcactttgggaggctgaggcaggtgtaccatgtgaagtcaggagtttgagaccagcctggccaacatagtgaaattccgtctctacaaaacatacaaaaattagccgggggtggtggttcgtgcttgtaattcccagctataaggcaggctgaggcagcagaatcactagaatccaggaggcggaggctgcagtgaacagagatcatgccactgcactccagcctggatgacaaagtgagactcaatctcaaaaacaaaaccaaaccaaacaaaacaaaacggaacaaaaacaaacttctgtgatagttcagctctcactgcttaatataggacaacataggaatctattttctactttaaagtaagttgtcttaatatatcttaaaattacctaattggtaagaaaaattaatagaaaaaggtatctctaatgcatgttgttaaatgtcccttcataaaaaaatacacgtcaaaattttgctggagttatctatatttttctcatatcaataaattcatattaatttatcaggcgcttactacttgagtgttatgtgatataaatcaagtcattttatgctaaacaatgtaaaattgatatactacacactataaaacaataaccttgcttttagggacataagacttagattattggtgttaatattatcttaatagttaaattcacttcatacttgttgaatgacaaatgcttagacaaacaacactataaactgtctaaaactataaactataaaagtataaactgaaaaccatacattaagcaaagcttagcagatataaacagaattcttacaatacatcttttctgtcctcagatgatctcactgcactgggattaggtcaacattgatttatgtcactgcgtgcaaggtcaaactttttctcatttgtcataaaaccactaattcattgcttttgtgtgtttatttgtattttgttttataaataaaggctaccctaggaaactttatggttctccatgcctttcttttaatattgagtctatcttctaattaacatcccttattagctaagtgaactgaattaaaaaaaaaactccagtaagagcaaacataaaccatatatatatatttatgacaatatttatttatgacaatagttatatatattatatataacataatgtattatttggacagaaactatattatatattataattaactatttctttagatttaataaaatgagtgaagtaaagctgataaggcgacctatagaatgaaaaaaatttgcaaatcatatatctgataaacaaccaatatacagagaactcctaaaagtcagcaacaaaataccaaacaaccaaagtcataaatgggcaaagaacttagatgtttcttcagagaagatatatacaaatggccaacagcacataaaaagatgttttatatcactaatcattagacaaatgcaaatcaaaactacaatgacatatcacctcacacccattagcgtggatactgtcaaaaatcgagaaaacagcaagtgttgttaagggtgtggaataattaagagccttctacattgttggtgggaatgtaaaataatatagccactatgcaagacagtagggcagatcctcaaaaaattaaaaataaaattttcatataatccggcaattcaatttttgggtaaatacacacacacacaaatgaaagtggtctcttaaagagttagttgtacacctatgttcatagcagcagcataagtagctaaaacatggacacaacccaaaagtccatcaacagatgaatggatgagcaaaatgtgggctgtgtgtgtgtaatgtgtacagatatacaaatgagaatattattcaacctcaaaaaggaaggaagtttcaacatagatgaaccttgaaaacgttatgctaagtgaaataagccattcatgaaaagagaaatactatattatttcacctatatgaggtactgagagtagtcaaaatcatagagacaaaaagtagaacggttcccccgagctgggggaagaaataatggggagttattttttaatgagtaggacgtttcagttttacaacaataaaaagtgtactgggtcaggtggggtggctcacacctgtaatcccagcactttgggaggccgaggcaggtggatcacctgaggtcaggagttcaagactagcctggccaacatggctaaaccccgtctctaccaaaaatacaaaaaaaattagccaagggtggtggtgcatgcctgtaatcccagctactcgggaggctgaggcaagagagttcctcgaacccaggaggtggaggtttcagtgagccgagatggtgccactgtactccagcctggctgacagagaggaactccatctcaaaaaagaaagagttctgaaaatgaatgatggtgatggctctccaacgttattaatgcatttaataacactggatggtatacttaaaaatagacatggtaaatttcatgttatgtgtattttctcacaataaaaaccaacttcacggctggggcaacatgttgaaacccctcactaccaaaacaaacaaacaaacaaacattgtcagtcatggtggcctgctcctgtagtcttagttacttggggagctcaggtgggaagaggtggaggctgcagttaagctgtgatcatgccactacactccagctagggcaacagagtgacaccccatctcacacacacacacacacacacacacacacacacaaaaccttgggaaaagatatagacatttaaatgtctcttcatttttttctcacatgcacaaattaaaaaacgaatgtaacttatataaaaagaagaatgcaatcgaagattatagttcaatgatacaatctagatgaaatataagattcaccatctattcctgttcattctgttttaacgatacacacaatacaggtgtcagcaataactatttaaataagtgaattatgtttgtgccactgaattattagctcactaaaagggatcatgactatactgtggctaaaggtggattacagcactggggtggttgcagtgcatttatgtcaagctgtaacaggcaatcagaaaggtcgcccttgaagaagactggtgcacagacagattagtaatgacatttcaaatgggcttcattcaaatagctcccatttctaagttcaatgttcttatgaatttgcacaagcaacctaggaaaataagcagaatttgcaataatgcaactataagtcctaataactctcatttcatggtatgcattttattgtatttcacaggaaagtgtatatctcagatttaacgaagccaaaattagctctataaatattaaaataaatttacattcattcagaaatattgggatttttttaaaacagaaagtaaaaaataataaattgaatcatgactatagaatatcatcatctcccaaatgcaaataactttcattaaactaatatacataagtatatattactagcatcagacatttgtattagaatgtatagaattagtgagtgtgtagtatgtggatacatacgtgtgtgtgtatgtatgtatttatttacatggagagtagacataaggaacttattttgtgaataagggagattatatttttattcaattatattcaaaattgaattatatttcatactttgggaagacaaaactttacttgctgaagttgctttaaaatatttcatttaaggtttcccaggcaagatggccgaataggagcagctctggtctgcatctcccagcgagactaacacagaaggtgggtgattactgcatttccaactgaggtacatggttcatctcatcgggactggttagacggtgggtacagcccacagcgggcaagcagaagcagggtggggtgtcacctcacctgagaagtgcaaggggtcagggaactccctcccctagccaagggaagccatgagggactgtgctgtgtgggacgtttctatccggtccagaaaactacgcttttaccatggtctttgcaacccacggaacaggagattcccttgggtgcctagatcaccagggccctgagtttaaagcaaaaactgggtggccttttgggcagacactgaactagctgtaggaggtttttcttgttgttgttttttgttttttgtttttttaccccagtggcaactggaacactgctgagacagaaccattcactcccctggaaaggaggctgaagccagggagccaagtggtctagctcagaggatcccaccaccgtggagcccagcaagctaagatccactggcttgaaattcttgctgccagcacagcagactgaagttgaactgggatgctctagcttggtggggggaggggcatcggccattactgaggcttgagtaggtggttttcccctgacagtataaacaaagccactaggatgttcgaactgggtagagtccactgcagcttggcaaagctgctgtagctagactacctctctagattcctcctctctgggcaaggcatctctaaaaggaaggcaacagcccaagtcaggggcttatagatcaaactcccatcttccagggacagagtgcctgggggaaggagcggccatgggcacagtttcagcagacttaaactttcctgcctgccggctctaaagagagcagcagatctcccagcacagcgcttgagctctgctaagggacagactgtctccttaagggacccccgtgcctcctgacggggagacacctcccagcaggagtcgagagacacatcatacaggagagctccagctggcatctggcaggtgcccctctgggatgaagcttccagagaaaggaacaggtaacaatctttgctgttctacagccttcgctggtgatacccaggtaaagagggcctggagtcgacctccagcagactccaacagacctgcagcagaggggactgactgttagaaggaaaactaacaaacagaaaggaatagcatcaacataaacaaaaaggacgtccaaaaagaaaccctatccgaaggtcaccaacatcaaagaccaaaggtggataaatccatgaagatgaggaaaaaacagcacaaaaaggctgaaaactccaaaaaccagaatgcctcttctcctccaaaggatcacaactcctcaccagcaagggaacaaaactggatggagaatgagtttgaagaatcgacagaagtaggcttcagaagatgagtaataacaagctcctccaagctaaaggagcatgttctaacccaatgcaaggaaacaaccttgaaaaaaggttagaggaattactaactagaataaccagttcagagaagagcataaatgacctgatggagctgaaaaacacagcacgagaacttcgtgaagcatacacaagtatcaatagccaaatcaatcaagcaggagaagaaaggatatcagaaattgaagatcaatttaatgaaataaagtgtgaagacaagattagagaaaaaagaatgaaaaggaatgaacaaagcctccaagaaatatgggactatttgaaaagacacatttgattggtgtacctgaaagtgatgggcagaatggaaccaagttggaaaacacacttcaggatattatccaggagaacttccccaacctagcaagacaggccaacattcaaattcaggaaatacaggaacaccacaaagatacttctcaagaagagcaacccgaagacacataatcatcagattcaccaaggttgaaatgaacaaaaaaatgttaagggcagccagagagaaaggtcgggttacccacaaagggaagcccatcagactaacagtagatctctaacagcagaaaacctacaagccagaagagagtggggggccaataatcaacattcttaaagaaaagaattttcaacccagaatttcatcgagccaaactaagcttcataagtgaaggagaaataaaatcctttacagacaatcaaatgctgagggattttatcaccaccagacctgccctacaggagctccagaagtgctaaatatggaaaggaaaaaccgatacagatcactgcaaaaacatatcaaaatgcaaaggacatcaacactatgaagaaactgcatcaactaatggacaaaataaccagctagcatcataatgacaggatcaaattcacacataacaacattaaccttaaatgtaaacaggctaaatgccccaattaaaagacacagactgcaaattggataaagagtcaagacccatcagtgtgctgaattcaggagacccagctcatgtgcaaaggcacatataggctcaaaataaagggacggaggaatatttaccaagcaaatggaaaggaaaaaaagcaggggttgcaatcatagtctctgataaaacagactttaaaccaacagagatcaaaaaagacaaagaagggcattacatagtggtaaagggatcaatgccacaagaagagctaactctcctaaatatatatgcacccaatacaggaatacccagattcataaagtaagttcttagagatctacaaagagagactctcacacaataatagtgggagactttaacaccccactatcaatattagacagatcaatgagacagaatattaacaaggatattcaggatttgaactcagctctggaccaagcagacctagtagacatctacagaactctccaccccaaatcaacagaatatgcattcttctcagcaccacagagcacttattctaaaattgaccacataattggaagcaaaatactcctcagcaaatgcaaaagaacagaaataataacaaacattctgtcagaccacagtgcaatcaaattagaactcatgattaagaaactcactcaaaactacacaattacgtggaaactgaacaacctgatcctgaatgactactgggtaaataacaaaattaaggcataaataaataagttctttgaaaccagtgagaacaatgacacagcataccagaatctctgggaaacagcaaaagcagtgttcagagggaaattcataactgctaaatgcccacatgagaaagcaggaatgatctaaaattgataccctattatcacaactaaaagaaccagagaagcaagggcaaacaaattcaaaagctagcagaagacaagaaataactgagatcagagcagaactgagggatatagaaacatgaaaaacccttcaaaaaaatcagtgaatccaggagctggtttttgaagagattaacaaaatagatagaccactagccagactaataaagaagaaaagagaaaataatcaaatagacacaataaaaaatgataaagggaatatcaccactgatcctgcagaaataaaaaaccaccatcagagaatactataaatacctctatgcaaataaactagaaaatctagaagaaatggataaattcctggacacatacaccctctcaagactaaaccaggaagaagttgaatacctgaatggaccaataaccagttctgaaattgaagcagtaattagtagcctaacaaccaaaaatagcccaggaccaggtggattcatagcttaattctactagaggtacaaagaggagctgtaaccattccttctaaaactattccaaacaacaggaaaagagggactcctccctaactcatttgatcaggccagcatcatcctgataccaaaacctgtaagagacccaacaaaaaagaaaatttcaggccaatatccctgatgaacattgatgcaaaaatcctcaaaaaaaaaaaaaacactggcaacccaaatccagcagcacactaaaaagcttatccaccacaatcaagtcagcttcatccctgggatactaggcgggctaaacttaggcaaattaataaatgtaatccatcacataaacagaaccaatgacaaaaaccaaatgattatctcaatagatgcgaaaaaggcctttgataaaattctacaccccatcatgctaaaaacactcaataaactaggtattgatggaacgtatcttaaaataccaagagctatttatgacaaactcacaggcaatatcatactgaatgggaaaaagtggaaagcattccttttgaaaaccagcaaaagacaaggatgccctctcttacctcttccgttcaacatactatggaaagttctggccagggcaatcagacaagagaaagaaataaagcgccttcaaataggaagagacgaagtcaaattatctgtttgcagatgacatgattgtatatttagaaaaccccattgtctcagccccaaaactccttaagctgataagcagcttcagcaaaatatcaggatacaaaatcaaagtgaacaaatcacaagctttcctatacaccaataatagacaaacagagagccaaatcatgagtgaactcccattcacaattgctatgaagagaataaaacacctaggaatacaacttacaagggatgagatgaacctcttcaaggactacaaaccactgctgaagcaaatgaaaaaggacacaaacaaacggaaagtcattccatgctcatggataggaagaattaaaattgtgaaaatggccatacttccctaagtaatttgtagagtcaattctattcccatcaagctaccattgactttcttcacagaattagaaaaaactactttaaattagatatggaaccaaaaaagagcctgtatagccaaggcaatcctaagcaaaaagaacaaagttggaggcatcatgctacctgacgtaaaactatattacaagcctgcagtaaccaaaacagcatggtactggtaccaaaacaaatatatagaccaatggaacagaatagaggccttagaaatgacaccacacatttacaaccatctgagctttgacaaaactgacaaaaacaagcaatggggaagggattctctgtttaataaatggtgtcgggaaaactggctagccatgtgcagaaaactgaaactggaccccttccttacaccttatacaaaaattaactcaagatggattaaagacttaaatgtaatacctaaaaccataaaaaccctagaagaaaacctaggcaataccattcaggacataggcatgggcaaaggcttcatgactaaaacaccaaaagcaaacacaacaaaagccaaaatagacaaatgagatctaattaaactacagagcttctgcagagcaaaagaaactatcatcagagtgaacaggcaacctacagaatgggagaaaagttttgcaatctatccatctgacaaagggctaatatccacaatctacaaagaactcaaacaaatttaaaagaaaaaaaaagtactccatcaaaaagtgggcaaaggagatgaacagacacttctcaaaagaagacatttatgcagccaataaacatatgaaaaaagtttaagttcgttgtagataaatgccaatcaaaaccacaatgaaataccatctcacgccagttagaatggtgatcattaaaaagacaggaaacaacagatgctggaaagaatgtggagaaatagaaatgcttttacactgttggtgggagtgtaaattagttcaatcattgtggaagacagtttggcgattcctcaaggacgtagaactagaaataccatttctcccagcaatcctattactggatatatacccaaaggactataaatcattctactgtaaagacacatggatacgtatgtttattgcagcactattcacaatagcaaaggcatggaaccaacccaaatgcccatcaatgatagattggataaagaaaatgtggcacatatacaccatagaatactatgcagccataaaaaaatgagttcatgtcctttgcagggacatggatgaagctggaaaccatcattctcagcaaagtaacacaggaacagaaaaccaaacactgcatgttctcactcataagtgggagtcgaacgatgagaacacatgggcacaggaaggggaacatcacaaaccggggcctgtcagggcatggaggaaaaggggagggataacattaagagaaatacctaacttagatgatgggttgataggtgcagcaaaccaccatagcacttgtatacctaggtaacaaacctgcacgttctgcacatgtatcccagaacttaaagtataattttaaaaaatttaaaatgtatatgtatttcaatatttcatttaaaatttatttcatattggtaagcatttgataaaaatgaagagttatttacatgggaaactttttttttttttttttttagatggagtctctctctgttgccagggtggagcatagtggtgcaatattggcacactgcaacctccgcatcccaagttcaagcaactctcctgcctcgacctctagagtagctgggactacatgtacaggccaccacacccagctaatttttgtatttttagtagagacggggtttcatcatgttggccaggatggtctcgatttcctgacctcgtgatccacccacctcagcctcccaaagtgctgggattataggcgtgagccagcacacccagcctacatgggaaacttaaatatatttttatttataaaaaactttaaatcactgtaacttgcctaaaatagtttattttcaaaaaaggaaaataatttagaaacattatttttactttaaaatatttgtataattaatttttattataacaaaacaaaatatcctgaagagtatagtaaaatcaaagaaattgatatattattagttagttaattaattaatttatcattttattttgttttgttttgagacagtgtctggctctgtcacccaggctggagtgcagtggtatgatcttggctcactgcaacctccgtccccacaggctcaagtgatcctcccacctcagcctcccaagtagttgagaccacaggcacttgccaccactctcggctaatattttttgtctgtttttgtacttttggtagagatggggttcaccatgtttcccaggctggtctccaactcctaagatcaaatgatccaacctcctcagtctgccaaagtgttggaatcacagacatgagccactgtgtccagcccaggtttattatttaataggaaactttcttgcatcaagttctatgtttattattttaattgattagtactttacatgatttaaattacaattttgtttaatcatacatgctccctctctagttgtttgacaatgtagaggtaatttaaaataaagttaacacactttctttttatttcaactaaattacagacgttccttccaattatagaatttaacatttccaatatagaatattcacaggaaacttgaaggataattacatgtagtattgtgtattgtgtatgataataactgtaccaaaattgttcttatttaaatagcatattacatacaatatgctggacttcagtctgaataattgtaacaaggcacccctgccttagctacccagagatgctttttgcccatatgccatgcactactgctttctccagccataaacttagtactctagagattgaaccatgagattatttgctttatcatgtgaggggttggggggagacaaagtatgaactgttcattaatattcatatattcttctattttgtgatactgttattactcgcccacctcatagttggccaaatgaaaaaagagaaacattaatcatactggatgtgatctgatgaaaaaattatcaaccagtttgtatgcatgagaattaaactcactgattctcttctgttcgctcctcctaagcagacgaatagtagtgatgctaaggtcttcaattctgtgtatactctagaaacaatttaataaatgagccccattagcaaatgaccgtataaaaggaaggtgttagccaactatatatcttcatcaaaaattaaatgtggtagaaaaatattactttttgatatttgttttggatttgagaaattgtgtgctttttattaaatgcctaagcagaaagtttcaattaatttggagccttcaatgaaaggaacatacttctaacctttgttaaaaattaccctatcttttgtcaggaactataacaaacctcatattttagtatacttgaaaggaagcaaacaagtaattttccctttcattcaatttacttataatttattttatttgacaaatgtatacggatttttgttggcattcagagtaaacatttaaccagttaattcaaaataataaatttcaccaagagtttcatatgtaggatacagtagtaaatattctgttagtcacttaatcattattcatttttatgcaagatttattaggcaacttacatattttaaagtaaattctgaaatatagatattggtattttttccaccatttaaaattattccatccattaacctccagcaaaatttatacacattagcattataatatctgagacagtaggtagatggctttacaaaatactaatgcctaaagtgtgacttggacatgaggatttaaaaatcttcccaagtggttctaatttgccactaaggtttagaacaaatgttaacaaaaatatagaaatctctctgaagaacccagaatacacagtgaccgatttttctctttagaatcacttttctaattatttttgcattcaaatagagattttgagtttaatacaaatataagtgcataccaaattagtgtctgggtagctccattttactgaataaatacattacatggagcttagaccatatttgggggaaatggagtggtcaatgacaaatgaagttagtctgcaatgattttttgaactatagtaaagcaactttttcaatggagaaatagagtttgctttgacaaagagaaagtgaggagcaggatgataaagaaggcatgctgacatatgtaacaacttggtagtttcagtaacagtttgtcaagatgtcagatctccccactattacagttcacaactaaaggttcctgatactccaaaaaagtcgcatttctgtgtgcagggtatctcattgtgtgatgtctaccaattttacaatttcaagaaaataaacaagtgtgtgtacaataaaataaaataactcctttttcctgtttctcaaactaagtactactatttgtttaatatatgtatgaatgtatgaatagttatattttaaatattgtgctatgggctcctgttaacaagaacctgctaggcttcaaacagaatatgtaaccaaatgaccgtcttatcacccaaggaggccttagttcaaagtattatttaaaataagtatatcagtacaattgttttatgatacttttctcaaattgctgtggcaaatatcacaaagatttagttataggtcccaatacttacatacttcaccttactgtcctttatttcccagaacaaagactataatttcaatatgtagtttaaatatagcaaaataagtagtggcctcagaaggacactatatgtttcttctcattttttcttcttaaaaaatattaagttgtattttatagtgtagaatttacataatgttccagagaatcttcacatttaaatcaatgttcatttgaaagctgctgctcataattgttctttatgttttaacaataagtataaaatgtatatgcaaattatgaggaaacgatacaaaatttacttctttctgaaggacacctttttacctagatgtacgtgaaagcatatttcctttagttcttacatttactttacatttgttgggaatttgtacatttctgtacataacgttacatttataaacaaatacatataactgtaattttgttgtaggtaattctactttgtgtaaacttcttcattgctgattaatattctaagagtacattgttgttttctggtatacattgcaatcgaatatgagaagagtgctgtgtttgtatctctgtctacagaacatccagtcttggtatgagagtacattgtctccatcactgtcttctttttgctctcatcttccttgaggctgctaagcgtattccctattctctgagttagacttatatgttcaatttcttggtggtatttattccataaagatttttcagagtgagaatatttcagacagaaaaggcaagaatgataaatttctggttataaatctataaattttacagctgactatatggggagggatattcagagggctgctccagaaataatctcttcaatgtcagatctataaataattgtgaagaggttgataccattacctgagacaggaaaacatcaaaaacggcatatttgtgatcaaagaacacatgttctttctgaaaataactatacatttagtctaaccccttattttataagaagcaagctgaaatatataaggatgtttttgtcctttgctatgtaatagaaagttataaaacctctattccataactattacatcattgtgcaggaaccctgtttatacaaaatatatttcctataaaaatatttactttgaaacgtttctgtcttacctttctgaatgctgcaattttgttatttttcaaattcactgtgacatgaatactttttttttttttttttgagacagagtttcgctcttgttgcccaagctggggtgcaattgcagggtcttgactcactgcaaccgccacctcccaggttcaagtgattctgctgcctcagactcctgggtagctgggattacagtcatgcaccaccacgcccggctaactttgtatttttagtagagagggggtttgtccatgttggtcaggctggtcttgaactcccgacctcaggtgatccacccgcctcggcctcccaaagtgctgggattacaggcgtgagccaccacgcccagctgaatacttttaattttaaattttacatcattttatgttatattacattaaattataacagtcttgaataaggaatataaaacatagaaaatgacttatgtctagatactgggtcataggaccagatgtgaattacaggtttacatctgacaattgttgtaggatgtattttaaataaaatttgccctatgtctggtttaacctaagcagatgactgaattttgatatgaaaactttcaaaatttaattttaagaccaaattgcttttagaacacagttatacattttcatccctccttcttcctatttaatggtattttataacttactgctttgtgtttgggtggggcatctgactagtttaggccaattaattgtaagaggcaatagcgtgagtcaaagccatgccagatgagcacttaattgccactagaaaagcttactgcgatttcttttcctctgccacagtcacagaaaaatttcaatctgttagttgctctagtagcctagatccctggagtgaggagatatggagcacaatccttactttgtctgaaatgaacatgcgacaacaagagtgagaaattaacccttgttgttaggtatctaagaaaaggtcaatttggtcctgatatgacgttttgtatctcactgtaacctaacctaaatgacatatgaaatagttgaacaactctttgtagaggactttctatatgcccagtactgttccactcacagtaagtatattgatgaacaagactgtaaaacttcatgccacagttgttaaggctataatcaataatttcttaattcaatgatatataaatactatgaagtaattaagcaaggtaatggcaagaagcaagtaaaggaggtaccttgaaatagtgatacttgaactgagaaaatgatcatacagaaatgatattatggaaatctggatcaagtgcactttagatatagaaaagcaattttctgcaataaaaaccatcatggtaaattgaggagaatgaacatcctttttggctgaggatgccagaagctaagcatgaaattagattggagagaaagagatggaaccagtttgtataggcacatgtatagcatgaaaagatgtttgcaacggaaatttattggaatagtacaataaacagggagataatctgatctcacctaccttttgaggaggttgctgcattttagaaaaacaactgtgggcagggaagaatggaaggaagatccctaaggcaggtgcaaggtacattaggctattgactcagaatagctatttataatggaaaatagtgagaaatggaggaatttgagctatatttgaaggtaacacagagagcatatgccattgtttgggatgactggtgttagtggatggaatagaagaataatctgcctcaagggtttggcctaaacaaatgtatatatggtagtgtaattatagagcatgagataagcagatttgctttcatcatgtatttacagtaaaaaggcattttcttaagccttacttgtaaaagaaatataaattttcaggacattacaaataatataacttttctaattacatgccaaaggtattatgtatagcactgtccaaaaatgttgaccacaagaacagccccatcctatcagaatatgtctgcaatatagtaaggactgatataaaagtaacatttaaatatatcagtatgacaagtataaatatattctaatatataccattaaacattaatattaaaatgttaacaatactaacattcacataataattattaataattgttaatttaatattcatttttggcctaattcttttgaaattatttcttacttactgtattttactagctttaaaaagccactataagtcagggacaattaacttcatatgataatcgagaagacaccatcagagaattttacttgttaataaataaatttgggcagaaattcaaaatgctgactattaaactactaagtttggtatcatagcatgctactggtgactgaaattttcttcatgcaataccatgacacattggaaaagggaagacaaagtcaacagagaaaatagatgggtcccatagatcacaaaagtgtcctgttttgatttcttatttgtagtaaaaactctagagataccatggttccagaagataaataaatatcaaaatctcagaggagaaagaaaatgaccagaaacatataatgacagaagacgtttttcagaggatatcctacaatgttacaattcctttcatgtttttttttagacagagtctcgctctgtcgcccaggctggagtgcagtggcgcgatctcgtctcactgcaaccctgcttcacaggtccaagcgattctcatgtctcagtctcctgagtagctgggattacaggtatgtgccaccatacccagctattttttgtgtttttagtagtgttggggtttcaccacgttggccaggctggtctcgaacttctgacctgaagtgatctgcctgcctcagcctcccaaaatgttgggattacaggtgtgagccaccacctgtaatcagacataaggagtccaaaaataactttagattttattttttttctttgttttaagtggaaatattttatccagctgtgtggacataaaaggctgtctcaatttatttatagttgggttgaggaagacgaacgttttgtatgaaagaaagctaaaggtttcccatcattcctaattctccaaaacgaaggaattggtgacttctaaattttattatctttaagataacttctatgatttgttttgttgaatcatagtttggtgtatctgaagtctttaaagtactattcccagggataataggtgtatttgcaaatggtatagataatatttgcaatctttgagaaatcatagttatcagaagaaagaaatattgcatcaccaaaaattctgtttgatatctaatcttttcactttgtaaggcaagacagtattttttgtcaaacttatttaaaatccagtctctatcagttactaccagagttctagttaaagtgaaattatataagacaagagtttttattctgacagttaaaagtatgtttttaggtgatatcattaacctctaggacttaacattaactatataataatacataaagttgcttaaataaaagtaagtttgattgtatgacctaggatcaggaaagccaaaaagtaatatatataactctgtaatagaacttcaataatttttgtgaatgagatatttgtgcatcaacattattattgttattattatttaattttcgcttttattttagattcgggagtacatgtgcaggtttgttacatgggtatattttgtgatgctgaggtttggggtttgaatgatcttgtcacccagggagtgagcatagcacacaatagttagtttttcaaccctcatctcccttcctccctccactgtctagtagtcctcagtgtctgctgttctcatctatactatgcatactcaatgtttagctgccatttataagtaagaacatatggtatttggttttctgttccagcattaattcgcttagggtaatagctttccgatgcatccatgttgctgcaaaggacaggatttcattttttcctatggctatgacatattgcatggtatataggtaccatgttttctttatccagtccacaattgatgggcatctaagttgatttcttttcttttcttttcttttttttttttttttttttgctattgtgaataatgctgttataaatattcaagtccaagtgtctgtggtagaacaatttattttcctttggggtctattcccactagtggaattgctgggttaaaaagtagctcttttttaggttctttgagaaatctccaactgctttctacagtggctaaactaaactacattccaaccaagagtctataagtgttccgttttctctgcaacctcacctacatctgttattttttttctttttaatgccattatgactggtttgagatggtatctcactgtgattttttcatttgcacttttgtaattatcagtgatgctgagcacgttttcaggtttgctggccacctgtatgtcttctcttgagaagtgtttatgttctttgagcactttgtaatgtggccattccttttcgattgttgaatcatttatgttcttcatggattctggatatttcattagacctttgtcagatgtatagtgtacaaatattttctcccattctgtaagttgtctgtgtactcccttgattatttctcttgctctgcagaatctattcagtttagttaggtcccacttgtcaacagttggttttatcgtaattccttttgagaacttaatcatcaattatttaccaaggcagatatccagaatggtatttcctaggtttttgtctaaggttttttagttttaggtcttgcatttaagtctttcattgatcttgagttaatttttgtatatggtgaaaggttgtgacccagtttcattcttcagcatatgactagccagttatcccagcaccatttattaaataggaagtcctttccccattgcttgtttttcttgacttttgttaaagatcagatggctgtatatgtgtgcagctttatttctaggttctctaccctttccactggtttatgtgtctgtacaagtaccatgctgtcttggttgctgtagaccagtagtatagtttgaagttgagtaatgtgatggctctggctttgtggtttttgcttagcattgctttggctattgtagctcttttttcagtttgatatgaattttagaatagttttttctaattctgtgaaaattgatattagtagtctgataggaatagtgttgaatctgtagattgaggcactgtggtcattttaacaatattgattgttccaatccatgagcatggtaagtatttccatttgtttgtgtcacctataatttctttcagaagtgtttggcagttacccatgtaaatatctctcacttctttggttatatgtattctcacgtacttttttggtgtatatgtggctattgtaaattagattgcattattgattagcctcttagcttgaacgcttttggtgtatagaaatgctacttgaatttgtacatcaattttgtatcctgaaactactgaaatgatttattagggccataagccttttagcagactctttatgtttttctaggtataaaatcattagtaaagagataattttacttcttttcgtatttggatgcctgttatttcttgcctgattgctctggctaggacttctagcactatattgaataggagtggtgagagtgagcatccttgtcttgttccagttcttaaggggaatgctttgagctttttcccattcagtatgatgttggctgtgagttcatcatagatgctgtgaaaatacccaattgctccagcaatcttgattgagaagatcaatcattttctaactaaattgtagttggaacagtgcaataagtaaagtgacaatgtatgtatctattttaattctttggtcgatttatctgtctttgtaaatttcacttccctacaatgacatgagttttaccaacgttttaaatctggtagtaacttggtcctttatattgccatttaaactttaaaatcagactgtaaagccctttaggggcaataaaagccttctgatgatttgcttgaaattttatggaatctataaaatgtttgaaaattaagaaagaagccttctaaataactatttagcctttcaaccctttaaattggcatatatgtttattcatgtagcattgttataattttttttcaaatatgctttaaatttttttatttgacataagggttacataacatatcttgctagtttgcaaatatgtgatgattttcactcatttttatttttacttttctagtttgagttcactatggtcggagaatatgctacattatttcaaaatgttaaagtttgttttgttttgctttgttttttcatagttcatcatatgatctatttcaacaagagaaggaagttttctgcacattttagatgttcgtattctaaacatgtataaaatgtaaattgattaatcatgcattcaaagtacagatatcatgaatgttttttctgcatgccttatctttcactaaaggaatttatttcaatcttcagttatgtttgttgatttttatattactcttttgaattccattactatttttgttttaagtattatagactttaaaactatgttataagaagcataggccgggcgcattggctcacgcctggaatcccagcattttgggagacggaagcaggcggatcacaaggtcaggagattgagaacatcctggccatcatggtgaaaccccgtctctactaaaaatacaaaaactagcaggatgtggtggtgcatgcctgtaatcccagctactccggaggctgaggcaggagaatcacttgaaccagggagttggaggttgcagtgagctgagatctcaccactatactcccagcctggtgacagagggagactccgtctcaaaaaaaaaaaaaaaaaaaaaaaagtttttagaaatgccctgagctcctattgattgaaccttaaatcattatctcttgtcctttaaataatatatttggtcttgggacttacgtgttttgttattaatagagggatacaacccttccattcattagtgttcacaatataaaactttatgaaatataacatttttcttccttctagttttaatctatgttcttacagtgtctctcatgaccatggcaatcacatgaattttctttgtcacatttagaaatctttgtcttataaaaaagatgtctatctttggataattttagacatacagaagagatagacattaacagggctgctgggctgggtgcggtggctcactcctgtaatcccagcactttgggaggcagaggtgggtggatcacctgaggtcaggagttcaagaccagcctggccaacatgaggaaaccccatctctactaaaaatacaaaaaattagctcggcgtggtggcaggcgtctgtaatcccaaatacttgggaggctgagccaggagaatcacttgaacccgggaggtggaggttgcggtgatccgaaatcaggccattgcacgccagcctgggcaacaagagtgaaactccgtctcaaaaaaaaaaaaaaagagggttgttgtttaccttcatccattttcgccatatatttacattgtacactaatccaagaaaatggctgtagatccagctctctaagaaaactctcttccttatctagaactttagtttatttacaccttgttttttgcacactcctcaaatgttttaaagagtatgaccacatttcaatatttccatttatttctcattattgaagtaaaaacactagcctggtgctacctacaacactctatcaggaaacaaagtttattcaaatttaaattgtatgacattcagtactttctatatattgtctgataactatttctatattatctgttaatctgataacagtgtatgtgaagacatcttagattcttgtgatatattttacaagataacacataaaaattcaaagttaagtagaatattttaaaggattactatcagttttcagaaagacacctactaacatttcatttttgtatgttgaatcattattactattattattcagaaagacacctattaacatttcacttttgtgtatcgaaggattatttgtagtgtgctagtagatttgcacatgcttttctcagtcctttattaaatttccctagaaatcaatgcttagataagagtgagaatgacagagatagaagtacttttgtaaccagtaaaccaaccatcttcaaatggtttgatagcaatcataagtaggaacagattattcttaatttaataagattcctgggacattaggaatatcctacatatgcccaatctctcccatgtgtttttcactttctgcaagatatgtgaaattttgtaggaaaagcctgcccatttagaatccatattttatggttttgaaatgtatagacaacataaaatagaaaattattaaatggttactaaagtaatttagtttgtggggacaagatgaaaggtaaataattgtgtgctggaaaggggaaggagggaaagtttgaaaacaagggaaaaggacaattaataaaagaggctgcagatcctaaagaagaccctctttgttgtccaaagtgatatcaacctgagttgtcttagcaaattcatctctcactagctaaatttccaaacagttgtacaataaatttcctgagatgatagatacaaaatactaacaataaatctaaataatggagatagacttttctgccaatgatcttagaataaagtgaaaaaattagaaaaagaacaaaaaatttctcgcaaaactaatgaagtgttgtgctggaataagtgaattcattgaaatgaagtagcattaaacacaaacaaggaaggaggagtaagaagaaattaatagagaaaaatattcctgaccttgaaattttagataattctttttatcttgagatcatcctttataattctacttatttttctaaagtggtatgctgctatcattattaattattctaataaaattttttaaaagtttataatttttattttatttgtaaggatttttgcatggggacaagattttactttactttttataattttttaatggaacatatgttcctatgaacagatttagtagctaaatcattgtcactttaaaattacaaaagatgacttttgatacttttaaatgccaattactaagtcatttgctttctcagcaggctttcttttccttttttgttaaatctcaactaattatgacacactgtgatcttctcactaacactttagagacatatcattagcacattatttattgctttttatctaattgcctcttggaaaagatgaacactctactatatattctgctgtagcaaccaaagattgttaagcatgcatcttttgacttattttaggatattaatttatctggggggcaaacactatatcaaatttgttatgtatctatatgaaacttatgacttgaggcattctgggatatacttttaaaatgtatacatatacacaaaaatgtatataatgtaatatatattttacatattctcctttaatgaattatctttatatatatacacacacataaacaaacacatatactttataatgaatcattttaataaataaatgtatatggcttcgttttacaaaaaatattcctaagaaaatggaaagtttcgggaaaatttgaatgacttttataaacacttgtctgtcttcgttataaatacagcatgcctttaattttatagaaaataagatgccataaagtccaattttacttaaatttaagggcatatatagaactaacttttaacttaatattgtataataaagcatgaagacagtagaatttttttttttttttttttttttttttttttttttttttttagacaagatctggctttgttgcccaggctgtagtgcagtggtgcagtctcagctcactgcagcctgaacctaccaggctcgagcaatcttcccacctcagcctcccgagtagctggcaccacaggcgtctgtcgccacacccagctatttttttcattttttgtagagatgaggtctccctatgttaccctggctgatctggaactcttgggctcaagtgatcttctcaccctcgccttgcaaagtgctgggattagaggcgtgagccaccacatctggcctgacaatataattgttttatgtatctagcattaatactgaagacattttccttactgttatgcacactttcacagtagcattttttgttaacaaaataacaataataatttgctaattttcattagaaaaacacatttaaacttgcctttgataagttttgcaatgaacatttacgtcaacgttagaatacaagaagaaataactgaaagatgattggtgttttcatttaaaggatttttgtttgtttgtctgtttgttttgagacggagtctcgcactgtcgcccaggctggatggagtgcaatggcgtgatctcagctcattgcaacctccgcatcccaggttcacgtgattctcctgcctcagcctcccgagcagctgggataacaggcacataccaccacacctggttaattttttgtacttttagtagagatggggtttcaatatgttggccagactggtctcaaactcctgaccttgtgatctgcctgccttggcctcccaaagtgctgtgattacaggtgtgagccaccacacccggcccatttaaagaatgttttaaaagagtggacttcatatagaatacatttggtttatataaagggggtattttttattattctttcttgtaaaatattaaaaaatctgttaaaatagattgacttctgttcattttcttgatatcaacaatttacatggaatagaaagagataagaaagaacaaaaattaaaagtgaggtcatttaaaaatgtcaaaaattaagaaaaatgttaaaaaataaaaattttactgaatattgtttttaagtagcaaatattttctaagaaaaaaaactttgttctggaagaactacaatttcccctaaagctttataagttcaaagttgggacagactttttaaggaaaagaaagattaacaagagaaaaagagggaaatgtattaatatgtgtagagtacatcgtaagagagaagatgcaataaaaggcaacagagtagtggcttataatgctgctttatatatcatttttcataaagtgcaatagaatttagagaagtgataagacaaaggaaagcaattttgggcttcttgaggtggaaaattatggaaaggtaaatacaggggagtaaactaacagaataagatttgtttgaagattcctctagtgctgtctgtgagctgctaagacttgtttccagtacagtaaataatttatttctgttggtgaaaaaggcaggaaagacaaaaagagctcttcctgtctttgcttcagtgtttctaaattgctttgtgctaaaacaaaatgtatgtgaaagaggtatattttggggtcacatgttttggttttcttcaccttcaactaagtgaaataggggacttcatttctgttacataatattatttccatcatttctattacataatagctccttgggatcatacaaattattcatctttgttttcttgcagcaattacattactgtcctattcaagcttaaattttcatatgacattacttagataaaaatgatgtgtatgtgtgtgagagaagagaaaaaaataaagaggatacattttggggtaaaaccttatatttctctatttgtgactcaaggaaaaaaataactgagtaggagggattttaagaattacctaattaaatatatattagattatttcatctttaaaatgctttttgtgattttctaagttggataatataagaaaaacaaagagagatgacagagatatttcaatgccaaatatcatcttcctcaccttagaaaatttaggctatttttatttgaggatttggtcactaaaatattttgaattgaaattttataagagatttcagaaaagtatgttattaagacatggcgagaaaaatattgtttcccaaatctgtacattatgagaaaatttaggtctgtggaagataaaaaattttactttcataaccttgaagaatattatacagtgaggggttaactctctggtaatgacagaggaaagagttagaggctggctaggcagatagagagggatggcctcgggagaccaataacgcctgtgggaacacactcgcactgcccctgttatgcaactggcagatagaaatgtggttaagaacttcctcttataccaggatatttgctcagaagggactgtcctgacttaggtgcaagtgcaataaatcaactaaatgtccttaacctgacccaagctcattataatatcattaacatgacatctgcattgctgtttgcccccacctctctgactgggcttttctgtggtgcttatgggtaataattaagatgaagtaactatggacaagaatgcacctgtgcagaccaggaagtaactaggaagtagagggttgtgtaagatgcaaatgagaaagatgcccctagaaaggaggtataaaaaccactggggacaagtttgttgttggcaacccattttagggtcccttctctttactgagaactttctgctgcttaataaaactctgttctgccttaccaaccctcttgtgtccaagtaccccattcctcaaggtcgtgagacaagaactcagaccttgctgaactaaggagtaaggaaacggcaacagtaagaagtaacctaataataaagttcagctccccacaaaatattgaaggtggttatttgacaccttgcttgtttaagtgttgagatcctaatatacacttcttgttcccatatagaacaagcaaaccaaacagaataagaagacaaaaataaccaatacttgctggaaatgagactatgctcccagagaaagaatgttcagatagtgagatctctctttggaattttagagttagaagattgggtgatggaaacaattttagcatgattgccttcaaaaaatgggtatttaaaaattttattcatctttattttatattgtgtggggttaatgaccgctttatctggttgaatcattttggtagacaaaaaaatttataatttttttgtgaataaattaatatagctcataaaaattttaaaaaatgcatttgtaaatatcccatctcaaaagagccgataaatatctactgtcaactgtgcttggtaggggtatgattaagaattatcatcttgttttttcagttttttaattaactaatatctgttagaaaatagaaaaccatatttcagcagtcatataactatatgaatctcctttttcgttatctttctctatctctctataacataacaaataatgttattttcccaatcacaactaaaggagatttctataaatcttttaaccaagtcttttataacaaaatagccgcttgcattctgcccttcattaaagagaggcatttatggagggattttgtctatatctttcctttttaaaccttaaatcattaaaacagacacaatttttgtgccgagtgatgttattaaacagaaatatagctagaatggaccacagactagccaaagaggctttgaacaatactctcaaagcttttcctgtaagtggtccttgcattgtttcttcatctcaaacactaagagagcacatgagcaaaacgcattcgcattttgattctataaattcaaatcaacaatgcaaatctttagttattatatttgcattagatcaaagagatgatcatgcctcaacgtaccatggcatactatcttctacagtagtgtatttttcaaaaacactgagattgatagtgtagattttactttgactcaggtgcgtgtgtgtgtgtgagagagagagagggagagaaagcaggaaggggcaaaagagcaaatgaggagagggacagttttcataagaagtgatatgaatctcactcattgacattactattctctctgtacctctctctggctgaggattgtagtatccttaaactttcacactgtatctggcatattgaaatgttattgatttagtatatttttaaacatgctatcttctggccgcgagtggtggctgacgcctggaatcccagcactttgggaggctgaggcaggtagatcacgaggtcaggagtccaagaccagcctggccaaatggtgaaacctcgtcctactaaaaacacaaaaatgagctgggtgcggtggcaggcgcctgtaatcgtagctacttgggaggctgaagcaggaggatcgcttgaacctgggtgatggaggttgcagtgagccaagatagtggtaccacactctagctgggttgcagagtgagactgtctcaaaaaaaaaaacaaaactgtcttccttccatcactttatatatactatttttcaattgattctataaattcaggtcaacaattataattttagctatgtgtagttttatttattctgcaaacaattatattttatataggttaattgaccactataattcaatatgaaagataaattatgtgttcttttttgaaataaaaacaaacaaggagtttaccttatctactttcttcaccaaatcttaaactgacttattgtaacatctgcgtttaaacaacttgtcaactcacgggcatctgtaaaaagattgacaatatcagtagtgacaggttctgaggaatccatataatattctaatagccatgtaacacagaagtctagtgagcagctggcaagacgcaactgttaaatgtgcatcatcttgaggtaggaaatacaagataacaaatcacagttgctaaacagaaataaaaacaaagccatcacctgtgtctcttctcaaaggacaaaactattctttaattgcattatagaaaaaatttattatgctcaacctaggagatcatgttgttaaataactttaactgtattcattgtaaaataagttaatagaatctaattcattttactattaaaatacattgatacaaaagataattgcaaatggtcattagttttagatgtgaatagctgtggcttttacaattcatttatccaaaaactataatcagtcaattttccattttattttaactcaatagaacaactattaaaacaattttggcatcaattacctgtataacccagataagccgtataatagcgttgtcgtgtgtttaaaaccaagtcactgaaatttttcatatgataatttttgcacacaataatcataattatcatcaagcataatgctgaaatttgtttagggtaaatctagctaaggaataagtaatttcaaatttctttaacacagttccttcaaataagggtactaatagaatttgttggaaaaataaaagcctattttaaaaataaagcattaatgcttaagaagtcaaataatcatatttgtcataaataaaaattactatatatgaaaaattactagatatacaattatatatatgctatatatacaaaaatatactatatatgaaaaaagataaaaattggaactattacctgctaataaaattatttggttcaagcgattctcctgcctcagcctcctgagtacctgggattataggcatgcaccaccatgcccagctaatttatttttgtatttttagtagagatggggtttcaccatattggtcaggctggtcacaaactcctcacctcgtgatccgcccgcctcggcctcccaaagcgctgggattacaggtgtaagttatccttttctttcccttgttggaggaggactcaattccacagcttcatcttagatttggcgtatgataaggagtccatgcaacccccctcacgacacatttttgttccaaactcaactccaagctttaggtcaaagccctaagaaagaaaactgggtcaaagaaatccagaggcagatgatgactgaagttaaaaggcacagttaaaaggtgagcatggctaattcccactgattaagccaagcctcccatttcatgaataaatgtcatgctaatatccatggcataaatgaggtctagggaactccaaggctactggcagtaagggagagagagatataggtgagagcagataattcctattttgtagcccctctctgcttcttgggtgcaagcagctttgggacccatgggtggcacctgccaaggtcacagggacttgaggacgcaaggatgaaagagggaaagaggatactcttctttctctccctcatgtaccccgggtattttctagaaagaaaagggaaccagggatgcctactcccctctttctagttgagtagctattcatcttcagtctgtacccctttcaaatgcatcctgaacccctgggtctcctttgaaaaaatgtcttcttttttccttcctcctcctttgtcctctcttcactgataggtaattgtgtctctgtactatgggacactccccttagttgcattctccaaactggaaagagttaatttcccaaaccttaagctggttggtttaggattggactcagggaagggagcccagaaacccaacatgctggcaaaagggtaaagttgttgttgttgatttttttttttaacgtgtcgggctgttggcctccttctctctgtgcaagctggtaaaaggcctcaggatgtttaaactccctttttctcattttgatacatgttttataataacccggtttgtctcttcttgccttcaggccctcaaactccaaacagtcaagcaaccagagcctctgatgatagtgccttctgctgggaacccttaaacaggcttctgagagaggtctgactgctgttttcccaaagcagtgccacctgtcagcaggaagcagttaagatcggtcttcgtccttatccttattctaacagcagttagacgtacttctttagaaggggaaatgagacaaccaagaataaagaggtccacagcgaacctctgaccagcctgcatgcagggaggagtgtgcactgggatgtagccttgggaagctggcgttgtgtgcgggggtgggggcgggggagcctggcctctcctgttccagggtggcacctgggattcagtctgtgaggtgggaaatgggctagcaggactctcactttgctgagagtccctgtttctttttttttcctctttgcccaataaattccatttttcgcacccttcaaaatgtctgtgagcttaatctttcatggtcatgtgacaaggaccctgtttttggatgaactaaggagaaagtcctacaacaaaatggcagtagtaacactaagaaagagagctctagtgctttgaggaagagtgtccttgaatatttggctgacttagaacacataagttatttgagaaaacaagacatccgtaaaagaattaatagaagcaagcaggtgcaacagaacaatctatgtcacccaaacggagccaagaatagttgacttcttatcagccagagctgaaacctttcaaaatggacagtaaattttggtttttgcttttagttttgccctcactgggctttaaaatcaaccctcaagtaggtaaaattgattttaattgatttaactgtactccaaagtcccaaaatgtcaaaaaattcaagtatgcgacaatctaaaacttaccataattgaatcaagaactaacaggtatgcaggaaaaaacaatagcttatgactcaaaattaggatgagaaatgtttttaaaaggcatcataagtagagagtgacaaagatacaaatacagaatatatgtcatcacacaatgcaagccaggaagcaatgggagggcattgttaaaaggtagaaagaaaaatgaagctgacaacatagaattctaaactcagaaatacatattttttgttaaaacaaaaagaagacaaaataaaggctattcacatatactgcagctgaaagaatgtattgtcaccatatcagttctacaaaaaatattgatgatttcttgttacagagaataatatatgaaaggaaaatgtagaactatacaaatcaatgaaaagcataagaattattaaatgcatgggtacacataaatgagctttttgcttttgccttcaattttttaaaaataattactgaatatttagaagaaaacattgaaaatgaattgctatgtttataatatggaggtaaatgtgaagctatactaaaaggccagaatagagaatactgataataccatggtagtttgatattttgcattaggtaattatctagggaaatataaaatattatttgagctagaccccaataagttaatgatgtatattgtaaattctagatgaacctaaaaaatagtacaactaaaaatcaataaaagaaataaaagtaatagaaaataatttctctagaaaaaaagtagaaaataaatgaatatatcaaaattcagaataagaataaaatacatgaaaaatggtagttaaaatgttaaatatagtttaaagcttaacatcagtaatcatcagataaatgcaaattaaaactactatgagataggccaggcacagtggctcacgcctgtagtcccagcactttgggaggccgaggcaggcagatcatgaggtcaagagtttgagaccagcctggccaatatggtgaaaccccgtctctactaaaaatacaaaaattagccagatgtggtggtgcacgcctgtagtcctagctacttgggaggctgaggcagaattgcttgaaactgggatgcagaggttgtagtgagccaaaatcatgccactacacgccatccagcctgggtgacagagtgagacttcgtctcaaaaacaaaaacaaaaacaaaaaactacaatgagctattgtcttacaccagtcagggttgctattattaaaaaaaaaataacagatgttggcaagaataaagacaaaagggaacacttatacactgttggtaaaaatgtgaattaattcaacatctgagaaagagaataagcagatttctcaaaaaattaaaaataaaactaccttttgacccagcaataacactcccaggtatctacccaatggagaataaattgttgtatcaaaaagaccactacacttgaatgtttatcaaagcactattcacaataaaaagatatggaatcaacctaagtgtccatcaatgggtgactggataaggaaaatgtggtatacatacagaatgaaatactacccagccaacaaaaagaatgtcttttgcagcaacattgatagaactggaggccattatcgtaagtgaaataagcgtagaaagccaaatactgcatattctcacttataagtgagtgctaaataatatatacacatggacatagagtgtggacaatcgagacttggaagggtgaaggagttggaggaaggtgaataatgagaaattacttaatgagcaaaatgtacattattcaggtggtgtctgaaaagcccagagttcaccaccatgtaatatatccatgtaacaaaattatacttgtatccctcaaattttaaaaataaaaaatataaattaaaaataaataaaatagtttacaatgttaactaaaaggcaaagattgtaaaattggaggaaaaaacaatgtatattctatctacatataattcaaactataaaggtataaacattaaaaactaattaacgaaaaatgatgcattgtggtcacactaatcaaaataaaccaagaatggtatatcaatattagacaaactacattcagaacaagaaacacacggaactacctaaagctataaaaccagcaactataattacacatagtaaatattggatttaattgtaaattttaaaaaaatctttcttctataatcaggaataagtcaagaatatttgcttacaccatgtctgttaacatttgtaagcaagaatatttgcttacaacatgtctgttaacattcctgtacttccttatttgttggccaattgtttcattgcattatcaaatttgtaaaatagtttgtggtcttctcactggaagataagaaagcgacaaaactacactctttggtatctttgtaagaattgaattacaattgcatagttaaagtagtgtttatagggatacttgtggaatatgacacatatttggaaggaagaacagtctgacatcaatgattgaggcttccctataataagctagagaaaaaatgaagagagaagaacaaatttaacaaattgtgaggaataaaatagaggcctggactctctactcagtgcaataatacaagaaaaataaacaaaagttacacctaatgaaaaagaaaatgcaatttttggatacataatcaaaacattaagaattatcttactgtagattataaaggtataggaaacaaaaaaatgtagaactcatttaaaacttctcatttatttgtaagaaacttatcagtactctgtaaattgtgctggtcttcttattcttgtgatatacattacaatatagaccaagtatgttttctatattgaggcaacatacatcgttttaagtttggatcagccttcaacaatttattcattgtatttttatgaaaatttgttcatttgatatctgagaatgtttaattggaagttttttttgctagcgtcattttctttgggacttctttatccttttggtaacaaccattttttttcaattatgttgacaatttcatcttcagtatgttcctttaaatgcatatctagaatctctcaaatggtgacagtctcaacattcccatgagcaccaattttctacctgcattcaatttttttcttttattattgtttttatttttcatttcctgtacttccttatttgttggccaattgtttcattgcattatcaaatttgtaaaatagtttgtggtcttctcactggaagataagaaagcgacaatactacactctttggtatctttgtaagaattgaattacaattgcatagttaaagtagtgtttatagggatacttgtggaatatgacacatatttggaaggaagaacagtctgacatcaatgattggggcttccctataataagctagagaaaaaatgaagagagaagaacaaatttaacaaattgtgaggaataaaataagaggccatcacctaacacaggggtctccaacccttgggccatagactagtcccagtccatggcttgttagtaaccgcgccgtgtagcaggaggtaagcagcaggccaggaacaaagctgagttccctctcctgacagatcagcagtggcattagattctcataagagcccaaaccctattgtgagctgcacatgcaagggatctaggttgtgcgctccttatgagaatctaatgataaatgtaatgtgcttgagtcatgccaagaccacccctgcattaatggaaaagttgtcttccactaaagcggcccctgatgaggaaaggcgaggaccactaaccaacagacactaaaattatttttcaaataatttaagaaagactttccatgcataaatttggcatgatagaaaattaagttaacttgaaaacataactaagcaaagtacactcatgagaagataacacaaaaatgttcacctataaaaggactgaaaatgtattaataaaaaaaaaaacttgctacaaagataatataaactatattcaaataaccctcagggagatagatgcaaattcctactcaaatcttggcaaattaaatacagtaatatttttaaattatcattaataaacataagtggagtttatccctttttatatgattggccagttcaatttaatgtattaatagactaaaaaagacaaaagtgtttggttattttataatttaacaaaattttacctgtaaaatccatcaatatttaaaaattaaacaacagtcttctagataacatattggtcaaagaaaaagctacaagggatatttacaaaatacttagaatacaatataccaaatttgagtgcagataaagcaatggtttgaggaaaatgtataacattagcacacatactattactactaaaaaaaattaatcaacaaattaatttttctaactgaagaaaatagaaaaagagtaagtaaattcaaagctataagaataaataataaaaaaagaaaaggtaattatgattcaattcaaaacaaaataaaatatagaccaaaattaatgcaggtaagtattcatttctgagattttaaaattgacaagtctttttccatattgatgaagacaaaaagggaatagatacaaataatatcatgaatgatataagggatatcaactcagattactgagcctgtaaaattatagtaaggaaagttttgtcaataaatttaacaaattcaaaaatgtacaaattttttaaatgtcatatactattgtagtaaatcagatagaagtcaccttactattcaagtttctattaaaataatcattaaatttttatgagagtgaaaatgcagtatcagagtactttactgattagtttcatcctacatttaaagaataaaagaatacacaaattttatataagctcttccaggaaacagaggaggaaaacatatttgtcagcttattatatgatgctctcaatatattaatactagaaaaaggcaaaccatggcaagaaaacaaatgcaaaaatgcttaataaatattagcaaatcaaatttagcaatataaataacatgtcattatttgggtgaggtggagataatcccaagcatgcaacattgattcaacattcaaaaattaacttattttatttgtagcatcaatttagtaaacaaaatatataaacatataaatagatatagaaaattaactttataaaatttaacatttattatctgaaaaataagaaattaaaggaactttcttatatttttcttttcaggatagggtattcttggttggcatttttgtttttccttcagcattttgtatatgtcatcccactccctcagggcctggaagaatttagatgagaaatatgcttccaggtatatcagagctttttcatatgttatttgcttacttgtgcctcttctcttcctcctttcaggatcccttttttctcttgaccattgaggtgacctttgatctacaacaactaatgaatcagaagacatatatgtattttataaataatgctttcaggcgttgggaagagaatttctttcagtcatccctaaaatgtgactgtctaggaattatgctgattacaatgggatatttttaagaagctttcttttccatcatgtccacctctacattttgaaatcacagtaaataagttagtgacaccctctgaggcacaggaaaattgataaattgaggaataatagaaaaaagaataataatattaataatatattaataatataggtttatcctaaaatgtttttgtgtaaacatggtataatcttttttaaaaaataaaatttatccaaaaacagttcataacttgcttctagaagataaggtcaacaattacatataaggtcttttaatgtccactcctcagtttaatgcaattgtgtttactatcattatttttaacatgacttttaaatgaaattatgtttattataataaatataagaaatttataaaaataaaagagtgaaatacactgtcacataatattacactatcaaaaataacttttaaacaaagtaacttttttttattatcctttaagttctagggtacatgtacacaacgtgcaggtttgttacatatgtatacgtgtgccatgttggtgtgctgcacccattaactcatcatttacattaggtatatctcctaatgctatccctccccacttcccccaccccatgacaggccccagtgtgtgacgttccccttcctgtgtccaagtgttctcattgttcgtttcccacctatgagtgagaacatgtggtgtttggttttctgtccttgtaatagtttgctcagaatgatggtttccagcttcatccatgtcactgcaaaggacatgaactcaccctttttatggctgcatagtattccatggtgtatagtgtcacattttcttaatccaatctgtcattgatggacaattgggttggttccaagtttttgctattgtgaatagtgccccaataaacatacgtgtgcatgtgtctttatagcagcatgatttgtaatcctttgggtatatacccagtaatgggatggctgggtcaaatggtatttctagttctagatccctgaggaatctccacactgtcttccacaatggttgaactagtttacggtcccaccaacagtgtaaaagtattcctatttctccacatcctctccagcacctgttgtttcctgactttttaatgatggccattctaactggtgtgagatggtatctcatcatggttttgatttgcatttctctgatggccagtgatgatggacatttttcatgtgtctgttggctgcataaatgtcttcttttgagaagtgtctgttcatatcctttgcccactttttgatgggcttgtttgattttttcttgtacatttgtttaagttcttcgtagattctggatattagccctttgtcagatgggtagattgcaaaaattttctcccattctgtaggttgcctgttcactctgatggtagtttcttttgctctgcagaagctctttaattagatcccatttgtcaattttggcttttgttgccattgcttttggtgttttagtcatgaagtccttgcccatgcctatgtcctgaatggtattgcctaggttttcttctagggtttttatggttttaggtctaacatgtaagtctttaatccatcctgaattaatttttgtataagtgtaaggaagggatccagtttcagctttctacatatggctagccagttttcccagcaccatttattaaatagggaatcctttcccaatttcttgtttttgtcaggtttgtcaaagatctgatggttgtatatgtgtggtattatttctgagggctctgttatgttccattggtctatatctctgttttggtaccagtatcatgctgttttggttactgtagccttgtagtatagtttgaagtcaggtagcgtgatgcctccggctttgttcttttggcttaggattgtcttggaaatgtttgctcttttttggttccacattaactttaaagcggttttttccaattctgtgaagaaagtcattggtagcttgatggggatggcattgaatctataaattaccttgggcagtatggccatttccacgatattgattcttcctatccatgagcatggaatgttcttctatttgtttgtgtcttcttttattttgttgagcagtggtttgtagctctccttgaagaggtccttcacatcccttgtaagttggattccaaggtattttattctctttgaagcaattgtgaatgggagttcactcatgatttggctctctgtttgtctgttattggtgtataggaatgcttgtgatttttgcacattgattttatatcctgagactttgctgaagttgcttatcagcttaaggagattttgggctgagacgatggggttttctaaatatacaatcatgtcatctgcaaacaggcacctctctcaccactcctattcaacatagtgttggaagttctggccagggctatcaggcgggagaaagaaagaaagggtattcaattaggaaaagaggaagtcaaattgtccctgtttacaaagtaactattttaaatatgccagcaaatatctgtacagataatagattgtccagaggagctattgctcaaaactctctggaattttagtctttttcccaaataatggggttaatgaaaactttaactcattcccatgaaggaataaaatggatacatgaacaccatgaacaatataagatgactgctgcataatcaaccccagttgtttagtgcacccctttgcaacactaatggaagctaccataggccccaaagtattttagctattgtctaaatagtagacttaaggaattttttttaaaaagagatctgaagttgaaatacagtaaattttattaaagtacctaagaatgtctgaaagcctcctaaaagaaaatatgtgttcaaagattaaccaaatggaagagattactctctatgtgatagtagttccagtcaatatgcagtcttattgatttaaacaaaggcaaagaaaaacacaaatttattttaatgtctaaaaattcttctctgaatatcactgaatattaaatcatagaatgttaggcttggctgggtgcagtggctcacgcctgtaatcctagcactttcagaggcagcggtgggcagatcactaggtcaggagttcgagaccagcctaaccaaaatggtgaaaccttgtctctactaaaaatataaaaattagctgggcatggtggtgcgtgcctgtaatcccagcttctcgggaggctgaggcaggagaattgcttgaacttgggaggcggaggttgcagtgagccaagattgcaccactgcaccactccagcctgggtgacagagtgagactctgtctcaaaataaaaataaaattaaaaaaaaagaatgttaggctgggaattacatgtgaaagaatataatcttactgaactttaactcttagcaaggactaaattatttctctcaatttagagaaatagaattataacctatatttcctaactccaagttagtgctcttctaaaaacaattgagtaaacggttttatctttccgtttctgcctgagttaaactgacttacaaattatatgattaacatatgtgaaacacatataataaatctacatttatgtaaagacaacattcttctttaccaattccattcttagagaacactggaaaacttcgatgaagaatgactttccctttagcctttaagtcatttaaatttagtgaatgcattcactattatattcccaacataaacggcataatctttctcatctctgttttattcctcgttgcccatatgtaattgactaaactgaaattagtacagcaaatttttcttcagtttgttgaagttgcaaacattgattcttgaactaacagcattttttataataatgatataggtaaagatcagcatcattagactatggagcagagttgcctgaacattcgtggaaaaaaataaattgaaagtggttattacaactatcctcactacacttccttgaaaatacacaggatatctattgcaaacttggatacaaaccattactctgctattaaacaatattagtctaaatatctatagtttaacacagttattgcctcattatacaggatgttgatcttatatagtgtagagttcaactgtttttctattgcaaaaatgaaacataccttacaacttcaaaaggcaaaatatactgtattaaaaggaattaaatctttgaaaaaatgaaagctgatatgataaatgatgctgtctactaaaatcatcagaataactaaaataattagtctcatcacagaagcaagagtcatttcaaaaagaataactattactcaaacactttaaaatattgataattgttataattaccaatgaatcattcaaaatatacattgttcctaagataaaattcttgttaatttatttgaggcactaattcataaatatactgaacaaaaatgtaaagattataatatggtttggaggtttgcctcatcgaaatctcatgttgagatgtgattcccagttttggaggtggggcctggtgggaggtgttgaatcataggagtggattctccatgaaatgcctaacatcattctcttggtgataaatgagttctcattctgagttcacacaagatacggttgtgtataaagaggtctctcttgctccctctctcactatgggatgtgcccggggcccttttacctttggccatgattataagcttcttgaagccttcaccagaagcacatgctggcttcacacttcctgtacagcctgcagaaccataagccaatttaatttttttctctataagttatccagcctcaagtattcctttatagcaatgcaaatggactaaaacagattgtgttgtgatttttttacactcataaacattgctgaaatttgtggcataatttaaatgattttaatgatattacaagtggtcattaagccattttaattttccatctataatgaaagataaaaagatctgtagcagatatatcatgaaagtatcaaaagagtcttaaaaactgaagtatttcttgtatatatggggttcatgaatattaatacaaaaatgaaaatatttcttcccatacctgtttattaaatttaaaaaactgtatatatttcaaatatgaatggtattatggattgaactgtgtcacccaaggaaagatactttgaaatcctaagctccagcatttcagaatgtggacttattggaaatataattatcgcagatgtgattagttaagatgaggttatacagaagtagtgtggaccctaatccaatatgattgttatccttataagaaaactgcagtaaaaacagacacgctgaggcagaacgctatgtgatgttgaaggcagagactgaaggcagctgcaagcgaaggaacatccaagattgcctgaaaaccaccagaagctagaaaaaggcagggaaagattttcctacaggtttcagaggggagtatgtctcacccatccccttgattttggacttctagcctccagaaaaggaaacaatattttttattttattttttgtttgtttgtttgtttttgagacagagtctagctctgtcacccaggctggagtgcaatggcaccatctctgcttactgcaaccttcacctcccaggttcaagcaattctctgccttagcctcctgagtacctgggactacaggtgcccgcaaccacacctggctatttttttttgtatttttagtagagacggggtttcaccatcttggccaggctggtcttgaactcctgaccttgtgatctgcttgcctcggcctcccaaagtgctgggattacaggcgtgagccattttttattgttttatgacacccacattgttatagcagcacctggaaattaattcaaattgtattttcgtattttcagctttcaaggagactatgaaattggaagaaagaaaagtgatcccaaattacaatcactgatagatatataatgtacaaataatattaaaatatttatctgatgcttatatatgtgtgtttgtcaacaataaatacatttatttgctgttttttttagacaggcattcaagctaggcatctactctgataagaataccatatttctagtactttcagtagcatgtgactacattgtcaggttgaaagtgaaggaattgctatggaagtgattggtagatcttctaaagagatgcccatctctttactttgtaatcagactgacattgactttgtataatgtggccattcttgtccttcagagctacctttgtgcatgtgcttttgaaatatcacctacagcttcaatagtccccagtttctatctctacctcagatctctctcctaatgacaagacatgaaaattgattgtctaactgatatcttctcttttttgtctcaaacacctctcaaaatcaacaagatcaaagtcaaactctagattacaataccgccctttttcttcttcaatgtatctgccttttctatttctcaggtcatgaaccaataaatgagttctctatttcttctacttcaaactttccatctgaaatctattaagagatactattggcctaatctgaaaatacatccaaaatctacctacttctacaactagtaccatccaccattatttttcttctgaaaaattacagtattctctgaataagtatttctacttcttcctttgccccttgtgtattctcaacatagtcatcagaatgagcctttaaaatacaagggagaggtctttcagtctgggaaagatggcatatattcatctctctctgtctccactacataaaatgacaaatcctggaaccaatgcaaaagagaagcaaaggaaaactccaaacattggaaagaaaaaggcagaatagttagggaccccaaacatgaaggaggggtatcttacatttgctggtctaatattttatattaaagactgtcaacagaaagtagtccatgtatgctcattcctccctgaattgaaggggagtcaagcccatgacatgaggaaagtacagcagtattgacaagggagagcaattgtatgccccactaaaaataaatggacagccataagatctttccttagccaggcttaaagttccctccccagtctaggggacccaaggctgggtgtcatcctcaccacaagtgcctggccttcagcctttttttctctctgcattctggagactctgttcctcaatgtagacacaacaggctttcaggcctggggaggtgatatctgtcttcctgagcagcaccagcaagagctaggagaccaacaggagcccaaaagcataagataacacaagcacatcaaaatagtattacactgcatctgaaactaaggttgctgttggaaacacagctccccaaaataggctaggacctgtataataagcctaagaaaaatgatttttcacaaacaagagttaaataaacagtaatcagaatctcctgactcaatagccaaaatatcaagatcacagtcaacgatcatctattggaagagccaagatggccaagatggaagagcctctcatactcagagaccagaccactaagaagacctgcacagtccaagatcttcagaaggaaggcactgagaatatacagcccagggaagatgcagaccctgggctaagggagagaaagctgggaacgcttcacagggttatctagcactacaactgattcctggctaacagcagctgtgagaaaaggggtgagttacacaggcatgtagttgccactctagccaagaacctccacaatcttagacgcaggagatcccatgcaccccatggacatttgggctggccgagagagctgcttggagagttggctgggacaggactctatcctgtgcaggacccagagggtttgacaaacaaacagctgcagtggaacatgtccagggatatccatttcctaggctcacaatgctcctgtaggtggctttgacctttgttgactatctggacagaacagggctacctttccagtgagatggggccagtctgatctgggtgtccccctgtctgcttttctaagggtcatgcctggtcacacctgcttacagcgcagcctctgatgtccaagcagggcacttcccagggaccaccacaatagcgcctttggtggtaaaccttgtgtaactgtcagagagcttctgcagtcaggcctgtgctggcaaacactgaccatagcatcccccaaatgttttgtcagaacaagggtgtggacctcactgcagctgccctgctgctaccactgcatgtgtgtgagcatgaaccccactgccattgctccaacaaagttgttttgctggcaccccctattggaatgttgttggcagcagatcgagaacatcttgacccctccagtgcagcagattcttaatgtcacagggccagggaacaaagctttgggcctggttccaactccccagggtcagaacaggccatccatgggtgctgagctgagccttggctccctagtattggccagaagtgaagccagtcaacacaatccaacttatactgtagtcaaaacctcaagggtatccatgaatatatacatataaaaaagccccattcaaagaacatcaactacaaacactaaaagaacactattccacaaagatgagaaagaaccagtgtaagacctctggcaactctaaaagctagaatttcttcttacttccaaataaccacattaactccacagaactctttccttaccagaatgaaatgtctggaaagacagacatagaattcagaatctggatgacaacaaagatcatcgaaattcaggagaaggttgaaacccaatccaagatatgtaagaaattccataaaatgatacaagagctaaaagatgaaatagccatttgatgaaagaaaggaaaaaaaaatagacctgagagctgaaaaacccactataagaattttataatacaatcagaagtattagcagcagaatagacagaccaagctgaggaaagattctcagaattcaaagacctgttctttgaatcaactaagtcagacaaaaagaaagaaaaaagaatgaacaaaacatctgagaaatatatgattatgcaaagaaactaaacctatgactcattggagtcaaaggaactcactggagtcaaaggatctaaacctatgactcattgaaagagggagagagagaacaagcaacttagaaaacatatattaagatatcctctgtgaaaatttccccaaccttgctaaagagatccccagtgtgatactacacaagtcaaaccttttacaagactatgactcagcagattatccaaggtcaacatgttaaaaaaatatattaaagacagttggagagtaggggcaggttatttacaaatggaaccccattaggttaactacagacctttcagcagaaaccccaaaagtcaacatctttaaattaaaaaaaaaaaattaccaagaattccatatctagccaaagtaagctctataagtgaatgagaaataaaattgttttcagacaaacaaatgctaaggacgttcattacattggattttctttgtaagaagtttttaggggcatgctaaagttgaaaactaaagacccttactgcccaccacaaaacgcacttaagtacatagacaattgacattatgaagccactatgcaaacaagtctgcaaaacaaccaactaccagtgtgatgacaggatcaaatacccacatataaactgtaaccttgaacatagtaataaatgggctaaacatacacttttaaaagcagagagggtaaagttggataaagaagcaaaacccaaccatatgctgtcttcatgatacccatatcatacgcaagaacgcacatcagctaaaagtaaagggatagagaaaattctatcaagcaaatgaaaaaaaaaacagcaaaaaaaggaggggctgccatttttatttcaaacaaaatagactttaaaccaacaattatcaaaaaagacaaagaagaacattacataatgataaagcatttaattccataagacttaactatactaaatataagtgcacccaacactaggacacctagattcattaaacaagttcttagaaatctaggaagagatctagatatctagggaatttagataactacgcagtaatagtgggagacttaaaacacaccactgacagtattagacagatcaccaaggcagaaaataaaaaaaaaggatatttggtacctaaactaaacacttgaccaaatgaacctaatagataaatacagaacactgcacccaacaacaagataatataaatttttctcacctgtacatggcacatatgctaaaatcaaccacacattcagccacaaagaaattctcaacaatttttttaaacctggaaatcataacaaccatactctcagaccacaactaaattaaaaacaaaaatcaatactaagaagatctcacaaaaccatacaattacatgaaaataaaacttatctgattctcaatgacatttgggtaaagaatgaaattaaagcagaaatcaagaaattctttgaaactaaagaaaatgaaggtacaacatatcagaatctctgggactcaactcaggcagtgctaaatgcccacatcaaaagttagaaagatctcaaataaccagcctaacatcacacctaaaggaatgagaaaacaagagcaaaccaacctcaaggctagcagaacaaaataaccaaaatcagaattgagctgaacaaaattgacatttgaaaaatccaacaagatatcaactaaaccaaaagttggtcatttgaaataataaaattaacagaccctcagctagactaataaagaaaaaaaaagagagagaaatacaaatattttagaaatgacaaaggagacatttccacagaccccacagaaatacaggaaaaaaaaaaaacctctttatgcacacaacctagaaaacctagaagaaatggatacatttctgcaacacttcccagattgaaccaggaagaaattgaaacatggaattgaccaataatgagttccaaaattgaattaaaaataaaaaccctacaaaccagaaaaaacccttgaacagacagattcatagccaaattctactggacatataaagaacagttggtgacaacactattgaaactatttcaaaaaatttgaggatggactcctccctgacttattatctgagtccagtgtcattctcataccaccaactggcagagacccaacaaaaaaattaaaacttcaggtcaatattcctgatatttcccaacaatatagtagtcaatcaaatcagttgcacatcaaagagccaatagattacaatcaagtaggtttatttctgggaggtagagttggttcaacatatgcaaatcagtacatatgattcattacataaacagaactaaaaaaatgatcatttcaatagatgcacagaagacttttgataaaattcaacatcccttcatgttaaaaactgtcaaagctaggcattgaaataaaatgccacaaaataagaagagccatctataacaaaccaatagctaatgtcatactgaatgaacaaaagcagaaaacattccccttgagaaccagaacaagacaaggatgcccaatctctctacttccattcaacatagtactggaaacccagcacagtaaagcaagagaaatatgtagcactcatccaaatagtaagagagaaaggcagacaatctcttttcacagacaataaaattctaaacatagaaaaccatatagactttaccaaaaagtctcctagacttgataaacatcttcagcaaagtttcaggatacgaaaacagtgtacaaaaatcagtaccattcctatacaccaacaacatccaagctgaaatcctaatcaggaacacaattccattcacgattcctgcaaaaagaataaaatatctaggaatacagctaaccagggaggtcatcttaaaattctttacaaggagaattacaaaacactgctaacagaatttagagatgacacaaacaaatggagaaacattccatgcttgtggataggaaaaatcaatattgttaaaatggacatacttcccaaagcaatctacagattaaatgatgtttctatcaaactatcaataacgattttcacagaatcagcagcaaactattctaaaatgcatatggaacaaaacaggaacctgaatagccaaaacaatgttaagcaaaaagacaaagccagaagcatcacactacctcacttcaaactacactacaaagctatggtaaccaaaactgcatggtactggtacataatcagatacatggacgaatggaacagaaaacagagcccagaaattaagctgcacacctactacacccatctaatcttcaacaaggttgacaaaaaaagcaatgaggaaagaactccctatttaaaaaacggtgcagggataattggctagttatatgcagaagattgaaactggactccttgcttttgccacatacaaaatcaactcaagaagaattaaagacttaaatgtaaaacacaaatctataaaaatcctagaagaaaatgtaggaaatactcttctggatatgggcactagcaaatatttcatgacaaagacaccaaaaccaagagtaatcaaaacaaaaattgacaaatggacctaattaatttttttttttttttgagatggagtctcgctctgtcacccagactggagtgcagtggcacgatctcggctcactgcaagctctgcctcctgggttcatgccattctcttgcctcagcctcctgagtagctgggactacaggcgcctgccatcatgcctggctaattttttgtatttttagtagagacggggtttcactgtgttagccaggatggcctcaatctcctgacctcatgatctgccctcctcagcctcccaaagttctgggattacaggcgtgagtcaccactcccggccaacaaatggacctaattaattaaagagcttctgcgcatcaaaagacataacagagtaaagagaaaatctacagaatggaagaaaacgtttgcaaattatgcatatgagaaaggtctaatatccagagtctataagaaacttaaattaacatacaaaaaccaaacaacccatttaaaaatgggcaagaacatgaacaggcacttctgaaaaaaagacatacatgaagccaacaagaatatgaaagaattttcaacatcactaatcattagagaaatgcaaatcaaaaccacgatgagatatcatttcacactagtcagaatggctattattaaagagtaaaatcaacagatactggtgaggttgcagagataagggaatgcttatagacagctggtgggaatgtaaattagttcagccacttgaaaagcagtttggagacttatcaaaggatttaaaacagaacaaacattcgacccagcaatctcactactgtatatatactctatgcaatataaatcattctcccataaagacacatgcaagtgtatgtccattgctgtacttttcaaaatagcaaagacatggaatcaatctagatgtcgagcagtggtggactggataataaaactgaggttcatattcactatagaatactatgtagcaataaaaaccaaaatcatatcttttgcaacaatacagatggagctggaggccattagtctaagcaaattaacacaggaacagaatgccaaataccacttcttctctcttgtaagtgggagctaaacattgagtgcacatggggaaaaaaaaaggggaacaatagatattggggtctacatgagggtggagggcgaggagaaggtgaggaacaaaacactatctatcaggcactatgctcattacctgggcgatgaaataatctgcacaccaaaccctcacaccatgcaatttatatgtgcaataaacctacacatgtacaacctcaacctaaattacagctggaagacaagagagatcatctctcatatcaaggaccaggaaaatcacaacttgaatgggaaagaaacaattagataacagtgacacgaaaggaaatcatctactagaattatatgccaaacattttaaagtaaatatcatgaaaataattcaactagcaattataagttatcttgaaacaaattaagaaatggaaaaaagcaaaaattacaatttataaaagagagtcaatagaaattatagaatgaaaaataaagtaacaaatgaaaagctcatcaaaatagataatatttgtaatcataggacagtcctcaacaaatataaaataattaaaaattttacagagattgcattctctggccataatgaaatcatattagaaatcaataacgaaaggacaacaaaaaatctttatgcacttggaaattaaactacaaaaacacatataaataatccacgcatcaaaagaaaagtatcaaaggaaattcaaacaaacaaaaaacataaatatgtaaaatttagtggaaatgataatacaacatctcaaaataagttggatataattaaagcattgctgagatcattgcacacactaacaaagaagaaaggtgtaaagtcgttaacctaagttctgacatcaggaaaatgaaaagaaagaagtaagtactttatggtgaaagactaaatgcctttccactaagaccaagaagaaagaaaggttctctccttttctgattcttgtttaatgagaaaacgcacacgcaaaaagaagtaaaaggcaaacagatgggaaataaaaataaaaataaaactttctttgaaaatgacataattctctgtgtagggagaatttacaaataatctcctagaactaatagggacattcagcaatgttgcaagacatatgatcaacaaatatgtcattcacattttaatataaatagtttacccttaaacagcacaggtttaaactgtgtgggtccacttatatgcagattttcttcaacctctgtcatccctgagctggcaagtttaaccccacctcttccaccgtcttctcagtttattcaatgtgaagactcaatgtgtagatgaatatctgtgaagatccacttccactaaatgaatagtaaatatattttattttccttatggcttccttaataacattttatttttgctagtcattttattgtaagaatacattatataatacatatacaaaatatgtaagaacggactatgttattggtaaggctgctggtcaacagtaggttattaatagttaagttttaggggagtcaaaagttgttgcatatagattttggaccgtgcaggggacagttctcttaactcctgcctcatttaagggtcgactatactaacaatgaatatgtgaagaacaaaaattaaaaactacaatgccattttcaattgctccaatgacaatgaaatccttgagtagacacttaaagtatgtataagatctatattctgtaaactaaaaaattctaacaaaagaaatcaaagaagatgtaaatacgtggagacataccatactaagattcaacaaagtgaagatgtcaattctcttgaaattcatctctaagtttaatgaatttcaagaaaaaattccagtttggctcattttagatatagccaatctcactcaaagatatcatatgaaaagatccaatctcttttagctaaaacactgttgaggaaaaggggaaggaatcaccttacctgacattatggcctgctgtatagctacagtggtcaagacaatgttgcattggtaaggggacagaccaatagatcaggaatatggcacagaatacaggattcaattcccactaccccacatctgcagaattccagcctgagaagccattggtgtgtaacacagacaaaggaccaccttggaagtgaagccactgcagagaattccttcgggaaaggggcccaggcagagagcttctttgaggatggagtttcccaaagccataacgtcaagaccccccatcccagaatccgaggaaggcagaacctctgccccagtgtttcctaaaggcaagacccccgccacagtgggtccagaaggtgggactgcagacccatggcgtctagagggcagaacattaagccaacgaagaccattctcaagcctttagtttaatattacttgctctgttggctttgggacttacttcttacgttttacttctgttttttcgttttttaatttttgtttgtttgtttgtattcctcacatttggaatggaatgtttgtccttcaaccattctatcactatgttttcaaaacacataacctgtttgattacatggtctcacactgtaggaaaacatgctcaggatgaatgtaccttgagtctcatccatgtatgatttagaaagtatttagatgaggctttagactagatttctgaattaatgctggataagttaagactattgtggatattgggatggcttgaatgcattttgcagtgagaaggatataaatttgagaacacataatcatgtttactcaaagggcatgatttctttctgtctgacactccagctaatgtcacaacactttccagtttactttttgggcacgaagtacattaattttcttttagtctctttagtctttcttgagcagagatttctaactcgtcataacccattgcatcttaccgggcactctagaggtctacatttcctctttcttttgcagttagtttgggccgtgttactcttatttggggttttacttccaggctgtgtttaaagctacttagatgatttcttccaccatctttgctccttttctctgttgacccacacatgcagaatttccagaaaatgaatctcagagacccgacttaagagttactcagaatagaatgagaaataaatgtcctgggttgatactcttagtcttcattaccctccgtaatacaaaaacatcgctcatcccaggaccactgcgtttgtcacaccatttgtctgagattctcctccacttagttctcacttgtctactgttcttccttcattttgggttttggctcaaaattactttgtcaaaaaggccctgttttattgactgttaggtaacaatggttatttagtcttttcacacacactatttccctttattgcacctaccaaatatacaacgaatgtttatttgtgcagtcatttttaaaaatatgtgttttcttacaagactgcacatttcataaaatatgatttattcaaaagtcactcccctgttccagcagaaatatatagatgataaggaaaattatcacccctgtaatcccagcactttggaaggtggaggcagctggattgcttgagcccaggagtttgatgctagcctgggtaacatggcaaaacactgtttctaccaacaacaacaacaaaaatagccagcaggggtggctcgtgtctgtagtcccaggtactcagctgaggtgggaggattgactgatcccaggaggtcaaggctgcagcagtgagctgtgatcttgccactgccctcctgcctgggtgacagagtgagaccctgtctcaaaaaaaaaaaaaagccaccattttatgtagcatgtaataaacgagcacaatgaggaacttgagtgtaaaaattttaaaaagaaaagtatgatgatgataaaatgaaccactaaaactaagaacaataagtgaaaaaaaatcacttttttctgagtgggagaaacaaaggtatagagacggtcttgctaaaggaaaattgtaaatttaagtagcaataaagaacgtggcataattttctccagcagtattcagtggcagaggaaaaatatatgcatgcaagtagtttggttgattgaatctgtggacagaaaaaaataaaaaagaaaaccaattgatgaattgtgggaaactatttcaagcaatggcccgggtcttctggaggtattagggaatattacagcatgaaatgacatatcttaataaagaagtttagagagaataagaaaacagtatagtcgaatattgttatagtaactacaataattaactacaacaattcatcattatattcaaagacagagaccaaaagatcatattgaaaccaacccaatagtctcatggacagttgtttttggataaacatagaaattgcccctttctggtcttaaaacttgaagccggccaggcgcggtggctcacgcctgtaatcccagcactttgggaggccgagtcaggtggatcacaaggtcaggagatcgagaccatcctggttaacacagtgaaaccctgtctctactaaaaatacgaaaaattagcagggcgtggtggcgggtgcctgtagtcccagctactcgggaggttgaggcaggagaatggcgtgaacccgggaggtggagcttgcagtgagccgagatggagccactgcactccagcctgggcaacagagcgagactccgtctaaaaaaacaaaatttgaagcctatatttgttttatctgagttccttcctcaggaaagtatcccccaggcatctcaaaaagtgttaaagaactgaaactcaccagatcaccacttactgacaatgagatgtaggacccgtcattcatcatgcttgtttccttgcccctccctagctcctgttttcatacacattgttacatttattctctgctatataaatttcctagtttgagttggtcagggagatggatttgagactgtattcctatcccctcagctgcggcagcagatggaaaccttcttccttggcaatatttgtcatctcagtgattggctttctgtgcagcaagcagcaggacatagactaaacctctggtattttggtaacaacatgtagtacaccagacttgattacagaaagaagaaagaaactacagggcaaaaataaaagactgaggggaagaggcccaatgaattttcattgttttgttttgttttgttttgttttgagacagagtctcactctgtagcctaggctggaatgcagtggcacgatcttggctcactgcaacttccacctcctgggttcaagcgattctcccacctcagcctcctgagtagctgggattacaggcgcctaccaccacacccagccaatttttttttttttttttggtatttttgtagagatggggtttcaccatgttggcaagactggtcttgaactcctgaactcaagtgatccgcccacctcagccttccaaattctgggattacaggcatgagccactgcgtctggcctagccaaataagttttcaaagtaggtgttttcccaagaaatatgagagaatttgggaaaaaaattaatgttactggcaatacttttcaaataaatgtatattgataagattgtatatattaaatattcatacggcataacaatttattctactgtgataatgaaaaagcaggagcttcttattcatagaaaccaaattgttacattattaaagctctaagggtttttatagattttgtaggcctcccttcctattatggatggtttggaaaggagagctcaataaaattatgaactttctagattgcaaaacatttctgcatggccttgtctttttccatttcattttgtttttcattattacacaaataaactaaataattgagtaattacttctgaattatcttcaaaaaagcattctacttaaggaacaagtgtaagatttaagcatatatttaatttttaaagaattcaatatttatatatgcacatattaaaaactcagatgaataagtttgatatagaatatatttagtagtaacaaaggaaattaaatgttgtaagtaattcaagtaggagattataaccataaaatacatgataggaatttgaaatgaatgcttttcttgaccagaagaatggatataggaaattccatttgaagataatgatgatgtggatctaattttaaaaaaaatgaaataccaggttcactaaagcctccttctgcttgcagaaattaaaatagagtttaaatctgtaatcagtatatgttgttccctttctaacatttcttaaagccataaataattttaatgacatgatctttctatctgttcgtttttatgttagtatatactcagacacttaaataaatataacacaggaaagagatgagccattagtaataaacaaagggatttaaatttgagaaagaacaattaacacttctatattcatttttaatcattcacttatcagaatgcattaaatcatcagaattgtgctgacttacataaatttccaactttagttgtagcacttcatcgatggagtcatgatgaatatcttagaaaatcccatttgttaacaaatatgtgaccttattaatacagaaaatgtcaattagaaatattattataactagaaatgtactgtaaatcagatatttggtattctctgcaaaaaaaaatcattaacagtacaggcttaatggaatttgtgaagaaactttgcaactttggtaattattaattaacactgaatacaataaaacctatatgggaactattggctagttttgcacatataatcaatgaactgcgtcagtcaaatttatattcagttgtagacaaaagtgctgtgtaagaatcattataaattaattagtacttaacatttaattgaaatgagcacaatgaaacattttgttttcggaaagtaagcttataagctatgaacaattttatttgcttttcactctccatttcactcctcaaacactgtttaaaattaggtctacaaacaaaaacaaaactgtcactcattttttttcaacttaacactcaccactaccaaccgcagaattcttattactgtagcgaaaatttagtgtatgaaaagtatgagatcaaaaagtaaactcaatgaatgatgagctctaagatccagtcacccacgctttacaattttattgtttaagccttgtcattggctcttggtttccttgagtacaatctctccttctcattcagcatgtctacagatgctcctcttaagttttcctaaccactgttcacagatacatttggggagaatcttctataggatgcttaactaatacagtttgttgatggactcttgttagtcttcctcttatttctaaaacgatagaaaaaatttcatcaattagcaacatattgaccctctattccatagtggtttcaatggtctacaacaataaaggtcaaataaatttaactcattgtaataataggcataatggacactatagttccagtattatagaactctctagttcaacattgttaccctcatgttctaacaaaattttgtctctaccaagctgaaaattttcagctgtgatcaaaccacagcaaattcagaacctctagggctactagattttggcatggtatagttccatcgtattaagcagtgtttatttatatgaatggtatagatttatgcctgaataagtcatgtttaatccaactgtagcttaatgatggcagtataatttggaagtcatcaccacaaagcatgagagtataaggaaaacacaggaaatcaagagagccagatttcagcatggatatagaaacaaacaatatgaatcctgctccggttgcttaggttttcaaggccttagattttccatcttaacagtaaacatatgttcttgaatgtctctaatatccatttaaatgacaatcatacattccattttggtagtgactttaagacccattatttattatgccacatagtggtgtttatccgctataaggatactgcctaccagttgacattttccaattttaaccaacagctctatttgatagaagtatatggcagcatataaactagagtatttttacattttaaaaatatttattttagggttgctaattcattttgagttttaatatttataatattcatatccaacattttcaggacaggtttaaacacatgtacatgtgcagtattttaccattttatacaatcaagtggtgttttttgcatagtgatccatcttatttttatttctcattgggctgcaaatcaagtaacactttgcaaacagcaatgtgatcattgaaacagtttttagcttggtaattgtagctcatgccttcactgtcatctgaaactgagactaacggtcttccttataaagatatctgcttattgattttgcaaaggttgaacagaagaagctttactctttttggtaactgtaacaagcactacctgcctatattgattacttactctcaatgttatagcaaattactattgtgaaaacataatgatgctgaacatttgtgctcagatgatagggtaatgtttaaacactgtgtgtcctgttctttgcagatttactaataacctctttaatcatttctgttcaaaataccatggactctaaagcagaagctagcctaatggcacaactaatataggaagcataacatttaataacttcaaaagaaatagcatcaattgctttccatcctttagatagcatgtcagatttttacaaatagtatttataataaaccgaaaataaatttatagaaactttaattctatttctactcttttcttcttaagccagcattggcgaatgtgatggtttatgttttctgacatgaattatatgcttaaagaatatattttaatgaaaacacataaatatttctaaaataagcacattttaatttaaaggcttatggaatcatatgtgttggaataagacgtcacttgaaaaaagctcaatgtggggaatttatgaagattatcatgaaagacattgtatctcatcataaaaattatatttaaaaattttttccttttaaaaacaacaattcatctattatatggattgaattagtttaaataaaaataattatttgggataaaattatcatcttattataatatcattattatagataggaaatactacttaaacggatttgaataaaacaataagactatttaataagaaaaatatctaaaactattataagcaaatgtgaaaaataaaagttatatatgataaaagttacaattcttagaaaatacattatgctgtattgtaatacaatataaacactagctcacttaagagtattagccagtagatttatgtaatattttgtgttgttgctctttgttaattttatttccatttttctcagtcttacttttactttctattgattgcatccatttagaaacaaaataatgactatagtcttattatcattatttatttggacctaaaataaccaggcctaattatatcaacctggacccaaaacaataaccacttctgaattggactttttgtaatcagttgtgtattcaatattttaaaacatttattaattatctaatatagttcatgtgttagaaaattggttgactatatgatgatactaataacacacaatatatttgttttaagagaacataaattctgtaacagtaatataaaaataaaagaatcaatataaaagaatctgtaaggatgcatttaagtttgcctgcaaaattcagaacaggtttctaagatgaggattatttaagctgagcctcactatgctttttcattgattaataattgatttacaaaatcaagtgtttgatgtgtccaaagtcatgtaagtttaaactgatgcttttgtgcatcaatttcataaatcatcattaaaaagagttgatcatatataactttttaatttttaatttttaaattaattaattaattaatttatttatttttgagacagattctcactgtgtcgcccaggctggagtgtaatggaacgatttcggctcgctgcaatctccgcctcctgggttcaccgccattctccagcctcagcctcccgaatagctgggactacaggcacatgccaccacacccagctgatttttgtatttttagtagagacgggggtttcaccatgttggccaggatggtctcgatctcttgacctcatgatccgcccgcctcggcctctcaaagtgctgggattacaggtgtgagccaccgtgcccggcctaaaaagagttgtacatacataatttatttaatgtatttcttaagatgtttgatatttttaaaaattagttttgttattaaatgagaggtgagaaattgcttaatgggtacaatgtacgttattcgggtgatgggtaccctaaagcccagacttcaccactacatgatgtccatgtaacaaaattgtacccctgaaatctatttttcaaaagttaacacattcaatttttagagcagttttaggttcacagtaaaactgaataaaaagttcagagttcccatacactccctgccctacccacatacaacctcccacactattcattgacttttctcatactcttttatagtatgtttaattccttagttattactctttgaaaactagatttttcctcaatgatttcagagaaatatgtatgtaataggaattctaacattaaatattgcccattatactattaatatatatgaatgaggtttgcaaacctggataattatttcagccaagataaatgtacttaaaacacaaattaatagctttaccagaataaaatattaaaatgatgtgcactatttattataatctttattaaaggctacacatgtgcatgcatctccatagtttaatgccttctctgttctttttaccgtatgtatgttttcacactcattgtttgtgtacttctaaataaatcaaccatctgtaatatttaagactctttatttttactgaggaccaaatataaaattcatctctcagaggcttccattcagggtaaagtgctagataaattagccagcagacaacaaaaagccagcagatttttttaagtctgtttctttgctcaacacctatgaaatgtcctaaagataattttgaaattcagtaaacatgcttggtacaattcttatttttctcttatatttatatatttaaaattaaagttttaaatatttaaatattaaatattaataattttagatattatttaaatatttgtatttaaatatttaaataaatattatttaaatataaatatataatatttacatattatatatttatagtgaaatttcaaattcagcatttaagaaattattttagtaaacataattttaggtttactttggttagagttaatttctggagactggagagcatcagtgaggtgaggagggtcttttagaaatgaagattttcatgcagtgggactagtagaaaatgattcatggaagtatggaatcacttgaaatcttcaggaaattgttatgcacctgggttatatcaagggatgggtttttgtggggttttttttttgttgtttgtttgtttgttttttgagatggagtcttgctctgttgcccaggctggagcgcaatgtcacgatcttggctcactgcaacctccgtcacccagggtcaatcaattctcctgcctcagcctcccaagtagcttggattacaggtgcataccactatgcccagctaatttttgtatttttagtagatatgggatttcaccatgttggtcaggctggtctcgaactcatgaccttgtgatctgcccaccttggcctcccaaagtgctgggattacaggtgtgagccaccacacccggccaagatgtgttttaaaagtgaggaatgggtcagattatggaaggatatgtttgatttttttctaagagttattagaaaaaaaacataatttttattaatggtaaattgtacttgcctaatttaatcaatttatttcaatatttaggggtaacaagtttccactgatgtagtgaaatgattaggggagtatggactatcatcagcacaaaagtcaaagggccactacaataatccaggtaagaagttttgatgatttaaagaaagggcatgccactgggaaatagagacacacacaagatagatattcagaagatgggctctgttaattgatgatgtatttcaatgtaacagggtaataaagagagaaaaccatgtggacgtttattcttccttaaccctaaatttaatgtacatctaatagtgaagagattgtattaaaatctgattttacaggtatggaattgggcttgatattctacatttctcgcaagctcccaggttaggcttatgctggcagcactcaaaatacattttgagtaacacagtactaagtttcttaaggtttcatgattaaaaatggcaggaaagattaagacaaaacatgtagtacacacacacacacacacatacacactcatacacacactaatatgaagggaagggtacaagtaaagttgatgaaaatatagacagaatataccaccatcacaaaaaggaaagttgacagtgataaagttatagttatttgtatctggagaggaagaattttcagagggtcctaataatcaaagaataatttctgagctaatttaataatatacagtctattttagtatttcctggacctttgattcaagaaaattaagtgcttagtgatctctatgacagaaaaggaacaggttgatattaggagatatattaaaaggagagaaaaaaattatatggcaaatggcattcacattttaacacttttctaccttacttcctcatttcatataaagtagaattcaaataaaagtacaaacatcatggtaaaattgagatgtttatgaggaattacttaaacttttattctttgaggagaatggaaaaaaaaaaacattgactaagatctctataaatgttactagaaagcattgacaagtatggctgagtcgtactcaacatgtagtagttcgaatatggatagctgtttaagttttctcccattttatcttttatctatctttcttttatttactgtacattttatcttttatctatctttcttttatttactctactttcatttatttactcttcctttagaagagtacttttctatgtgctaattaaacttttccatgtttcaaatatgttttctatatgatctgctaatttctgatataactccctgtttattaggtataattacagaaaggaatgtcttttcctggaaaccattaaactgaagccaagattgcctgttattctctgctggaatttctaatatgtcagttaagaaagctggttggaagtaagagagaatggagccagcatgcagagaaaagtaggcagatgagataaagaaacaaaccgttgaaattggagtctctagttctaaatgattttgccactcattggcttttcagatgtccaagagttttgatcatccaatactccacacatactttgggcatataatcactgcctcttagagtctaaagcagggctggaaagaatttccttcgtcataaaaaagtatgacaaattcattctcaaaataatgttattaagagtaaaatataaaaaaaggaagaaacattttccatttctttcctattctgaattttgtaatagctactactctgtagggttcaataaagttcattttcatgtcatacaaactttattgattcagttcagcttcgcgagtttgcactgaagtattgctcaccctaaaataatgctaatcaagtaattctacgacatctatataaccttgcagtaaaaggcgcaccagtgtaaaggtgggtgaattacagtctatttgatgcttgatttactcttcaactgtctccagtaatgaaatatagcagccaggaactaaagcttgggtgagtttctaacagattagagttatttggtgaagagggtagatctctggggaaatactaggaataaatatggttatttaaaaattctctcgctttttttttttttttttttttttttaggatctggtctatatttgcgtttgcttcagaccaaagtaagttggaagttgacacaattacatatatttatctttctttcctaatcgatttaggatatcagaatcatttcattgatgctaatataggagaggttaatactcaaaaatctttactgaagtaaaagtaaaaggaatggctgaaaatcagctgacagccagtttctacatgtttcacctcgacttaacattcagacattgttcagatcccctgaagttacttatgttctgaatatttactaaagtgctggactggatattatgtttttaaagaagaaaaatgatgtagattattataaaagaaggaagcttctttctctaaagatcaagttttaaaaatttaggagtggtggaagtttctaacatatttccgtagtgatataccactaggataaaaccattattataatattcaaccagcacctttagatatatcattttacttatgaaccttagtgaatcaatacttgtttttcacaaaagaggtacttaaaccttaatcaatacaaaatctgatatttatatttgtttatccagcaaagtattgtggtagaatattttccttaaaatggaacatggaatccaatactccaatcatatgtggaaaaatgaggctatgtgtatgtgtatatatatatatatatatatatatgtatatatatatgtatatataaacaagcatatgtatatatacacacatatatgtatatataattttgttatgcaaagaaaaaagaataattctttttatgaatatttatgtaatgtaaaacccaaagactaccttttctcttgtcaaatatataaatttaggtctggtttttatactatatctataaagttcatcatcatatacatggtgtaatttggaatttattaatattttgatgaataatataccaatcaaaagacaagacataatttaaacatgtattaaaagtttaaaaattgaaggaatttcaacttttaataaatttgtggttctgttaggtattagacaacataacatcatgtatctacaatatatagatattgctataatctatgattcatcctgcaacaaaaaagtaacataaatgaaaaagatgaaatgtatttaatatgaattagttttttaaaaaacctggcaaaaatttaagagataaataataagaagatatttaggatcataattgcactcttaagtaacaactataagatattggacatattatttggtctgatatcccatctcccttcctttgataatattgcccacgattttgctagaaattctgtcaaattattgccactatgcatttttctttttatattaacaaaaaagcagatgaaatatgtcttttttaaaaagtagttcacaaacattttattaacttgatatcttcatttctgcttccttagatatcattgaaattatggttacatgtaattagtgattctacttttgaattattaaagttaataatttaaagttaatattttgctactaaattagctttgccttaatttggaatagttctcaattgtaagatttgtttccattcaaagtccagatttcacaatccctattggccaatttggtcatgtaaataaatattttattaatagtgatcttgatttaaaaaagcacatataaatactttgtaactaaaatataatctgaataaattaaaaatccttaacaaaaattattctttttacttacccaagtaacagatctatggcaatactgatttgtctaaacatttcagaatcaacctgtttatgtgaatttttggttcattcaatcaaatatctacattgacaatttgttatttgattaattgttttgataaataagacaatgaaacagattatggatactcatatagaaacaattgtacatctagctaaattatttaactttacaatttatctcaaaaattcttccataaacaaattcaacaggatattcatcaaaaataaaaactactgaaatatgaatacaaacaaaaacatgaatcacgaaataattatgctgagtgaaaaaaatctgtgtaaaaaggaatacatattgtatgaaaattcaaactgatctttggtagccaaaattataccagtagttatataaagtacaaggcaccatgagataacttttgtatgtgatagccatatgtttatttattatgtttacttcttcattctggtgatgggtttataggtgtatagatacttgtttctatttcttaactttttttaagttcaggggtatatgtgcagatttgttacatagataaacgcatgtcacaggtgttagttatacagattattttgccatgcagttattaagcctaatacccattagttatttttcttgatcccctccctcctcccaactcttcactttcagatagaacccagtgtctgttgttcccctgtaagtgtccatgtgttcttatcatttagcactcacttatacgttctcacttgtttttctgttgctgtgttagtttgctaatgtagaaataatggatgatggcctccagcttcacctacgctcctgcaaaggacatggtctcattcttttttatgaacatatggttgtatagtattccatcgcacatgtgcagcacatttttaaaatctagtctaccactgatgggcatttagatggattccatgtcttttctattgtgaatagtgctgcaataaacacgcgtgcatgtgtctttatgatagagtgatatatattcctttgggtatataccctgtaatgggattgctgggtcaaatagcatttctgttttcagctctttgaaaaatggccacactgctttccacaatggtggaactaatttacactcctacaaacagtgtataaatgttctctttctctgcaaccttgccagcacgttattttttggctttttagtaataaccattctgactggtgtgagatagtatttcatagtggttttgatttgcatttctctattgatcagtgatagcaagcatttttttatgcttgttggtctcatgtatgtcttattttatttcttttcttttttttttttttttttttttgagacagagccttgctcttttgcccaggctggagtgaagtggtgcaatctcggctcactgcagccctctgcctcccaggttccagagattctcctgcctcaggctcctggctagctgaaattacaggtacatgccaccacgtctggctaatgtttgtatttttagtagagatggggtttcaccatgttggccaggctggtctcgaactcctgacctcaggtgatcggcccaccttggtctcccaaagtgctgggattaaaggcgtgagccaccgcacctggctgtatgtcttattttcaaaagtgtctgttaatgtcttttgcccacttttcaatgggattgtttggcttttgcttataaatttgtttaagctccttatagatgctagatattagatctttgtcagatatagtttgcaaaaatgttctcctattctgtaggttgtctgtttactatctattctctttcattggtatatatgtcaggttttgtacaatatcatgctattttggtgactgtagccccgtagtatagtttgaaatttggtagcaaattgttctttttgttaggttgcttttttctttttgcttaggtttgccttggctattttggctcttttttggttccatataaattttgaaatagaattttctagttatgtgaagaatgtcactggtagtttgataggatagtattgaatctgtaaattgctccgggggcagtatggccattttaataatatttattcttactattcatgatcatggaatgtttttccatttgtttgcattatctctgtttgtttgtacagtgttttgtagttgtcactgtagagacctttaatctccctggttatctgtattcctaggtattttattctttttgtggcaactgtgagtgggattgccttcctgatttggctctcggcttgactgttgttggtgtatgggaattctagtgagttttgtacattgattttatttcttgaaactttgctgaagttgtttatcagctcaaagaacttttgtgacaagactatggggtttcctagatttagagtcatgtcatctgcaaaccgagatagtttggcttcctatcctttttttttttttttttttttttttttttgagacagagtcttgctctgtcgcccaggctggagtgcagtggtatgatctcggcttactgcaagctccgcctcctgggttcacgccattctcctgcctcagcctcctgagtagctgggactacaggcacccgccaccacgcccagctaattttttgtatttttagtagagacagggtttcactgtgttagccaggatggtctcaatctcctgacctcgtgatccgcctgcctcaacctcccaaagtgctgggattacaggcgtgagccaccacacccggcctggcttcctatcttcttttggatgtacttttttctttctcttgcctgtttgctgtggttacgatgtccaatactattttgaatatgtgtggtgagagagggcatccttgtcttgtgttggttatcaaggggaaagcttccggatttttccctttcagtataatgttggctatgggtttgtcacagatggttcttattattttgaggtgtttcttcaatatccagtttactgagagttttttttaacataaaggggtattgaattttattgaaagacttttctgcatctactgatataatcatgggttttttaaatttatttctctttaagtgatgaatcacatttatttatttgcatatttaaatcaactttgcatcccagggatgaagcctacttatctacaaatgactcatttggagatattttttattgacttatatttttttccaaaatattttacttccatggtttctcaatgtccagtagtatgtgttaaaacttgggaagagtgtacaattagttggagtcattctagattttattttgttcttctaatggttctttcatttatttttagatgtttcatattaagaagtcattaacttgactgcagttactctttctcctgcatggtgagcaatcattgatttatctgctcagcttctctgtctgtttgcatatatgtatatacctatcttcgattgttaatctatctgcctgagtccctagaggttgtatctgggcttttagagtttcactattattccatgattatgtacaagcacctcaaactattttggctacagcactctgtctctccaactgtgaatgagttgagaaacatattcaaagtgtcaacaacttcacaagtatccccaagccttattatttccctcctctttctggactctcccatgaacatgaaacatgtataagtacgtcagagattactcaaaccattgtttaacgctctctcaacttccaaaatctactttttaaatttctacctgctctgctattacttgaacctggctagtaaaattttcaccactctatctggggaaggaaattagaataaccctagggaagaaggcaacaaatttgccatacttaccagggacagtgaaagtttttcatgaataaatgtcttctgttacctagtgcaacgaaatgattgtttcatatgtactccaattttgtatggattttctgtataaattgtctgacctcttcatgccaccattcccagaaataaagcttcaagaaacattacttttacaaacatattagtagaaatagtgtatgtgatagcagcaggaggcaggcaaatcctaggcagacaggggtgggtgcccagtgaaaccgaccttcaagccgaagacagtttaaagcttgaaaaccaagctacaagtctcagataaatctgttgaccagattgagaacctctcttcctgtttggtgtgctttcctctcattgatgcccacccttcacctattttacatatacctaggcttcccaattggtttttgccctgttgtgcccatcttttgagtggtgcttttttctaaccttttttgcatatttgcagcacacaattccccattctaagcccataaaccccaaatcagacacactgggagattacctgacttcccatagggggctgccctctttaagtcccctctctgctgagaactgtcactcaataaaactcttcgccttgctcacccttcagctgtcagtgtaacctcattcttcttagacgcaggacaagaacccaggacctgcggaacacgagtacaaaaaatgctgaaacactgtagtcctccaccctctggaagcaccaggcagctgccccagaagacaggcaatggcagggctgggccagcccaaaagccatgggctagaggggggtggtgggaaggagagaagagttatgacccttctggggtcctagacctcggggatccctgagcgagagctgtaacactctgtaacacaccccttggggctccagggccactggcatctccaaatttggggggcgccaccatgttcctctcatctagacacgaacacccaaggcagaagcaacttgtagtatgcctggtccagccgcagcctcacgcagcgccggcacctgtgtggccacctggagctccccgccctgcagcagcagccagtgctgacacatccctcgccactccgcacctggctcgcctttggtgggtgtgagatccaggccggggcgcaagccatgctcagcggactgggctgagtgggcaggatatctccagaggcaatcccggagccaacagaggccttgggcaggggcatttccagccgcagaggtctccggctggagaagaactgaaaaattcctgcattatatgtatactggaaatttggtaagagagtagatcttaagtgttctcaccatgcacacacacacacacacaaacacacacacacacacgatagaaagtcatccatgtgaagtgatgaatgtgttacctacctagattgcggtaataatttcacaatgtatacatacatcaaatcatcacattatataccttaaacatatacagctttatttggcaattatacctcactaaagctttgaaaatattttgcagtttattctcaaggtttgaaatataggaaaaattatcaaaattatacttgctcctttcaaaggatctaactattcaagtatctataactttctctactatatatatatatataatgtataatatgtatatatatatatatatatatatatttttttttttttttttttttttttttgagagggagtctcactctgtcacccagactggagtgcagtggtgtggtctcggctcactgcagcctctgcctcctgggttcaagcgattctcctgctgcagcctcccgagtagctgggactacaggtgcccaccaccacctctggctaattttttttttccttgtatttttagtagagacggggtttcaccatgttaaccaggatggtctccatctcctgacctcgcgatccacgcccctcggcctcccaaagtgctgggattacaggtgtgagccatcgcgcccggcctaaaatttttacgttcatctgcatctggcctctgttgtggaggaagtataatactctttggaagaactaaaaaagcatcagaaacattcaggaccttcctgacggttgcataacagcaggattttgaagactggattccatcccaaatcctattttgaacatcctcaaaaggattgccttgctaccactaaagccatgacaatttagaacagacagtgacaaatcattaactgtcttgtaatgattactccaaaagccttagcatggccggcaaagttctactcactaaaacatttccacggatataaaaacgtctgaaggttttttataaaagataacagaaatgtatatattttaacaggaaattaatgattatgttgtgagggaatatatcctaaaaagaaagataagaaaggataatcaatctaaggaaaattcgtacatctgagtagtgacagtgacttggtaattgaaaaataaagggttagggcaatgccacagaatttttttttttttttttttgagatggagtctcactctgtcgcccaggctggagtgcagtggcgtgatctcggctcactgcaaggtccacctcctgggttcatgccgttcaccagagaaaaactttatgttaagtttctgtgaatctacttttacacttaagctaactgaaaatagtttctttaaaatttatttgtagtgattatgacttcattaataatttcagctgtatctaagtttcttattgtgttttggtttacttcttaggaaaacagctacagatttctactctcatccaaaagtcagtcattcacagtatgtatggtatttcaaactgggcttatcaaaatgcaaattaatgcaagccacacccacaatcctttgcagttaaatgtttcctaagaatgtctacttaattataatattttagaaagaagtactcatttctaatgttagaaacctagaagaaatgtacagatatctagacacttggctcaaataattctccaaatccaaataattcttaggagatattctattcatattctttaaaaaatatgttaccattttattataatttttttttgtttgttttgttttgagactgagtcttgctctgtcaccaggctggagtgcagtggcatcatctcggctcactgcaacctccgcctcccgggttcaagtgattctcctacctcagcctctgagtagctggaattacaggcacacgccaccatgcccagctaatttttgtatttttagtagagacaagttttcaccatgttggccaggatggtctcgatctcttgacctcatgattcacccacctcagcttcccaaagtgctgggattacaggtgtgagccaccacgcccggccaaaagtgttttttctatgattttctctattatgtctaatttaaataactgtttagagaaccatgaatcaatctatcttccctcttgtgttctccttttctctcgctctttccaccttttcatctgtattcctcacactctccctttctaacagctgtaaaaagtttccttaagtctggtccatgaaaaaaatgaataatatctcaaactttagaaacagtcacaataatagaacaattcaaaaaatagaaggatgctaattaaaagtagcttgttagacacttgaggaaaaggacaaaaagtaaatggctgatttccaaacagtttgtttgacaaaggaaaaaaaaaagagagaagaagaaaaggattacatctgtccaacaaaccctattgtcttcacttttactagtagcgttcagcgttattgattttgacaaaaggctttccaaactgagtgaaattgttcagttttccttttaacctttggaattcagtgttttccctttataggtgttcagaatagttctatcacagacctgttggcatgtaaaattatttccaagtgaacatcaactagacttatgtggaatgttcatattcaggcatatgccccatatcattccccaaatctaaaacatttttgtcagatattctggtcagcttattaatcctttaatatttatattccaaaaaacttgtctaataatattttcttgtatttaataatcacaacaatcaaaaagttcttatccatgtctattttctgtttaaaatgaagttcctttggtctttttctctggcatatgtgctctatgattctagtagtttctctaacatacgaggagtcactctttaggttattttcttttaaacagattcacaatctttacctttttatatacacacatatgcattacagaaatatttacttttctatagaaatgttgcagaaaatcaagaggcaaacattttgcctaccatttccagatagtttagttggttcctgacattacaatatatggtaagattgtattggaagaaaaaaatctacataatgttttacaataattttatgagaaattactaatgagagcagtgaggaaggaaaaatccaaaagtagttggaagaaaaaaatgtaaaaataatcacaagcatttatcagaaaaaagttcctattcagtctggagagtgctgtatggaaaaataattaacattaacttactcttttcccattgcctataataggtcatcacaaggcagaaaattttgtcaaaaacaaattgtgaaattgctgacattttggaatgcaaatgttatggtttgaatgtctcctccaaaactcctgttgcaatttaattgctattgtaacaatattaacaaatgggacctttaagaagtcattaggtcgtgagggttctgtgcactcacttgctcttctgtcattttatgatgcagtgagaaggtcctcaccatatgtggccactgaatgttaaactttcagcctccagaaccatgaatcaaatacacttctattgtttataagttacccagtttgtggtattctgccagagcagtagaaaattaaacaagacaacaaacaagtgaagaattcaatcctttgttcatgaaaatgtttaaatgtggaaaataaatgtttattacaaggaaaaaatgtgtacatagagtgaaatatatagaatgatatttctgttcttctattcttctttgcttcaaaactgattatactaaataagaacagctttggttttacatttttcttccaatttcttttttttttctagtttaagttaaaaatcaatagtgtcaaggaaaaggtgagagaaaaataagctaatcaacacttagaaggtgacaagtaggtaatttaacccatgatatcttactggaatcccaataaagaaggagttgtcacaaattgcatctttatctcttacaactacacagccaggtaatttttttttcaaagtggtaaattttttattatcttaactagaatgtcaccacatattttctctctcacttttttttttttttttttgagtcttactctgttgcccaggctggagtgcagtgagtcaatctcagctcactgcaaactccgcctcccgggttcaaatgattctcctgcctcagcctgctgagtagctgggactacaggcgcccgccatcacacccagctaatttttgtatttttagtagagatggtttcaccatgtttgtcaggctggtcttgaacacctgacctcgtgatccatccacctaggactcctcccaaagtgttgggattacaggcatgagccaccacgcccgacccacatattttctaagattaaaagtggcatccaatttgccggcaattattaaatgaataattaattgatttttttttaatttcaatacatatctttctgtttagaaagtatacttcaaattttttagtgatcaatttcattgctttattcatgtcacggaattgggggaaaaaagataaatctgttttcatgtccaaatggtaacagaaaatttattcactttaaagattaaaatgtttctttaaaaaaacaaagtgaactatgcatttctcaatgaaattatttaaatgtaaatgtggtaaaatacacttgactaccatttgtttactttgtattatttttataaagaaaataagtgtgtctatttaataactaatgtactcctcaagaagccttttaaacttttaccacagtaattgttaacattcttaatctctttgacaatctgaatactagccctaacctcaaaattaggtgtaaagcattggttctttgttgttgcttacaaatatatataggacttctgtgatcaaaacataactaatgtcataaatttacaacaaatcaaagagccaatcccatgtcatatagcgtaggtcaaatattaaagaggttgtcagatcaattcttcaagagagttttaaaatgtactagtttttaagtactattgcaggagaggcaagggaaaataggactcaacctcctgccaggaaagaatatttatttttttcttagtagtggatattctcagtattattgatatttcatatgttttaggccatcaaaaatataagtagtcttccacataagaaaaattgatgggataaacaaaactggctgtctcaattggtgctgtgtctttaggatagtgaaaatttttaaaaatatggagaagaatagacatagctactaaaatggccaattagcgatttttaaaattttttatcttaattttaatttgatttttaaaaattttaaacaattccaacaatctttaaatttagttacctgaaaaatgattaatgtaaataactaaatgctaaaaagtaattatttaaaaggttttttttttttttttttgagatggagtctggctgtgtcgcccaggctggagtgcagtgtcgcaatctctgctcactgcaagccccacctcctgggttcacaccattctcctgcctcagcctcccgagtagttgggactacaggcgcccgccaccacgcccggctaatttttggtatatttagtagagacggggttacatcgtgttagccaggatggtctcgatctcctgacctcgtgatccgcctgcctcggcctcccaaagtgctgggaatacaggtgtgagccaccacttccggcctaaaggttttttttaaaagcatgcacaacactgaaagaaagcataagatctttaaataccaactatgaaatgtcaccataaatttaaagtggctgctgaagccagggactaccataagccaactaccagtcactgtatcatactgtatcataatgggaagagttttcatggttgtgctggtaggaagagattgggcataaggccaaattatcaaaaaatagaaagtctatgccaacaaaaccctcaatgaaagacggtctaccaggtgaaacaaaaaacaaaggaaacaacttatatacgaaaggaaagaaagtgacacttgccactagtttctgagtgactgacaagaaggttttctttgggaattcttaaacggtagttggcatccatatgagtttgaggtcagtgttcacactatgtgacacatgcgaagaatgtcaatatgataacttttgtttaaaatgtcccatattgcccacaatcctattcagagaatgcattaaaactttctctgtaggaataaatcctaaaacagattagttaaaattttgccagataaagttcaaataagcatgttttaaacaaacaaaaaatcatactgtaaaccaactctattcaacactatttcaacaaatattatttgagtacttgatactaggtactgttctagattctaggcatgctatagtaagcaacaaagaaaaaaaaatccctgcatgcatggattgtagattccagtgaagaagataaacagaaaattcaatttataattgtgtggtattatatgtttaaatataatagcttttgtgtgagggttctccagagaaacagaagcaatggtatatatatacatttaagagagaatgtttcatgggaattggctcaagtgattacagaggatgagcagttctacaatatgttgtcttcaagctggagaaccagaacacctgggggtgtcattcagtttgagtctaagggatggagaagccgggagccaatgctgtcactcaacctgagggcagaggcttgagaatcagaagcttccatgtatgagggcaggagaagatggatgtcttagctcaagaacaaagaacaaatttgctcttcttgtggacaatttgttatactgatccctcaatagattagatgatgcccaaccaaatttatgagggcatatcttctttttcagtttcctaatcaaatgctaatctcttccagaaacaccctcacagtcacacccagaataaacaatggtttacaagcttctggatatcccttaacccagtcaaattgatatagaagaggctgggcgcggtggctcacgcctgtaatcccaacactttgggaggccgaggagggcggatcacgaggtcaggagatcgagaccatcctggctaacacggtgaaaccccgtctctactaaaaatacaaaaaaattagccgggcgtggtggcaggcgcctgtagccccagctactcgggaggctgaggcaggagaatggcgtgaacccgggaggcagagcttgcagtgagctgacatcccgccactgcactccagcctgggcgacagagcgagactctgtctcaaaaaaaaaaaaatgatataggagagtaaccatcacaagtccatcctgtgtcaaattggcacccatgtgtattttattatgccatatttaatctcccaataaagacaataacaaaatcataatttcatctaatatgatacaactatccttcgtacaaccaaaaacacactactgttttttgcagaaaaggaaacaaaattgtaagtatgtttacacttcaatagtggagtattgctgcacatgcccatctatatggcttgtgggtcagataacacccataaaccatgttttatcaattatctgggtattccttaacccagcaagttgacacatgaaattaaccattccagcatctatgggaaattatgggtgttaaatgtaatgcactgggctagagggacaacacaatgaataaaaatcaatagaaacaaacaaatagttctccaaggacttctgctattgagaatatcaaatagcaatattaaacagcaaattaaacagacaagaccgaaaacagaatgagagacagagagagagacagacagaggacagacagaggaagatagagggagaaaaacgtgaaaaaattaaagagatttcaccacatattacagaggaaaagggctatggaatactgaaacaaaagatgttttaaaatatgcttttcatataaattaatgaaggagatgatttcaggataacataagagaaacaattttgcgtgtgtgtgtgtgtgtatacactatttgagaattttctagtaccgaataaatccatgatgcaggacgcacagtatctgttcattagcactaacagaaataccttagtaactagataaacaatagtatcactagagagcaatttatgaagcaagatctgttgaattatcttcaaaaatgataacaaggctgacaagcaatttctcaacaatgaaaaaagaagccaaaagtcaattagagaatgtcttccagatgctgaaagaaaatgttcatccagtagaactgtgtacttatggcaggacaaataaacaatttcaaggattcattaaaatatgttctatttgatagaaaatgatttagtgattatagaaaaaaaaatcatggcttgtctggggttaccatgaaagtttgttttatcagtttcagcaagtttcccaatgcatgttccccagagttactggaggcaggatatactttgaaagtcgcttccagacattcgttaaccagtgaacatgtgcacaggaacataaatctgacatttaaagaatggcagtgtcaggtccacgtgttctgggtcattatatattatgttactattgcacagttccactctaataattgcagttgattaaggcctttctactgtttatagggtttattaattgtcacacttactacactacagtaaccaatttaattaaaatttttgaattagggcaaaacagaaacattttcagaagaaaaaaatataaagaagccatttagaactataagaggttcacgaaaattcaatgaataactttcaaaatgaaaacaagaaggtttctcaaaatgaatatgtaagattcaatacagaatgtttaacaaaggaataaattaacctctaaataaatcaaaacattagttgttagtataaaaacacacacaaaaaaggtctaaattatgatgatactcagcaggaccagattaagttactgggcaatacaagcaaataaaccggtacaaggggagaatgggtgggtgagaaagtcctttattttccttgtgttgtttggaaaggtagtaaatatatatgttaaatgagtagtaggttaagtctacatgttctattattaaacgtgttactaaagaataaaaatggactttaggattacaaatcttaaaaatggaatcaatttagcagaaggcagaataataaaaagcacacatttaagcggtagaaatgtacacatatataagtaatcacaattaatgtaattgggctaaatgtatttcttataataacgattgtaactggatagaaaacattacacttcattcttctttagaagagacattctaaagtagatcaacagataaaggtaaaaagtaaaaagaaggaaagcaaaattgatgaataaaaagggcaaacattaaaaacatttaagctagttaggaaaaacaaaataggctctaaccataaagtggtaataaaaataaaaattaaaaaatgactgcaggccaggcacggtggctcacacctgtaatcccagcactttgggaggcagagtcgggcggatcacaaaggcaagagatagagaccatcacgcccaacatggtgaaactttgtctctactaaaaatataaaaattagcttggcatgatgacatgtgcctgtagtctcagctacttgggaggctgagaaaggagaatctcttgaacttgggaggcgaaggttgcagtgagctgagatcatgccactgcactccagcctggtgacacaggaagactccctctcaaaaaaaaaaaaaaaaaaaaaaaaaaaagacagcaaactctaagactcagaagcagagaaaataaaagataatttaaaataatgaatggggaaaaactttgaagaaaggtaaaaaggccgggggagacagccataaatacataagagtcaaagcaagaatgggagacagagggtcgggggttgacttgtgaaaaatagtttcggtagagaatcacaaggtaacaaggaggcactgtgaacaatgtcacactcatacattttaattcttagttgtaatagaaaatacactaattttttcaaagtaattttagcaaacagaaaactcaacttgtatataaacattaaaaacatttagtcagtgatttcatttatatacccagctcacaaggttataaatgttaattcctccatggcatgatcccagctcactgcaacctctgcctcccaggttcaggcgattttcctgcctcagcctcccgagtagctgggattacaggtgcccaccaccacacctggctaatttttttgtattttttgtagagacggggtttcaccatgttggccaggctgcttttgaactcctgacctcgagtgatctgcctgccttggcctcccaaagtgctacaattacaggtgtgagccactatgcccagccaagaaagaaactattctaacctaaacctgtcctgattatttttaaaaaggagaaaatctgttaattttattttatgattaaagaatgtagcaaaaatctatagcaagtatcatagttactgttgaaacataaaagacatttcctttgacttaagaaaagtttaaaaaagtagctattattctatttaacattgtactgaaaatcttggagcatacaattatacattaaattatagcacagaataaaattacaaattattacaaggagaaatcagtattttataacatttaggaacagtttaaaaagtagatcaaacatcaaaaattccattaacttggtgatttttttcaaatattagtcattcgtttgaattttataaattctgataaaatttctatttgtcaatataaattattttattttaacactaatttcttagctgtgatagttgtataatttactgacacaaatttaatattcattcaggaaataggttttcttatgaggagtcaatatttttatctgaaagtattaatctatgcagtaataatcatggaaaataaattttaaaactcagtagcattttataacaatttgtaagaatctcaattttttacgaaaagtcaaagtagatatttagcagaagagattatatgtatggttgggtgtgggtgtgaagtacatactgggacattcaaacgtgcgtctcttaaaattactatgtttataattgacagggaaattatataatattgacctcattacaataatcaaataatattcatgattatcccattttgaatattgtgctttcttatgaaacaatattaccaagcatgattctatatgcaatgctatgtatttaaggttttgttttgtttttgttttttggggggacaaggtctcactctgttgcccaggctggagtgttgtggcacaattacagctcactacagtccagacttccccaggctcaggttatcctcccacctcagtctcctgagaagctgaaactacaagcacatgccaccatgcctagctaatttttgtgttttctgtagagacagggttccatcatgttgtccaagctaatctccatcacctggcctcatgcaatcctcctactctgcctcccaaagtgctggcattacaggcatgagccgccttgcctagtcagcattattcaagatttcataaggtaattattactcatttgtattacttaagccatattttacatcattttaaaacatttatcattttactaagttaattgtaatctgagtatgttattttacattttttattctcttaatcacattattcttttctgtcactctctctagatcttgctgatttccacaatcaagaaatacagcagcatattgctccaagcaactaagttcaaatgcacagaaattctgagtaatgtctatctgaattttttctttgaggaaagttatgttggaatccatttaagatgaaaactttaaaaggtacatggtaaactttgcattaagtatgtgtctgaattttatcttttcaatttccctcttggctccagaagtttgaagcaattaatcttgaacattaaaatacatttgtgtttgaaaaatcttaatatgtttaaacagataatgattcttatgtattctagttccacatctaaaagataactccacaactttaattttctgtgaagtttatattctcccagatgtttacattaatcttaaaagaaccttttactattttcatttataattaggtccaacaacaataagcattttgataggatatcaaagtaatttttattcactataccaactccagaaacattaaaaaaaaaaagctaaaaggcaaaaatgaccacaaatgttaatctgtttctgcaatctaatataaaatgtgaaacaatgggagaatttaaaagacacaaaaataatggggagggggtgctattattttgtgttggataatcaaataaatattaacacaatgttctcaaagttcttttttagttttttttttaatttttaaaatttgtgtgggtacatagtaggtgtatatgtttatggggtgcatgagatgttttgttacaggcatgtgatgtgaaataagcattatgggaaatggggtatccatcccctcgagcatttatcctttgaattctaaatgaggtaagtaatcagttgaggggtgtatggaggagtgggaagaacttccaaaaaaagagaaaagcatgtgaaagcatggtagagaaaactccctgcgtatatagaataaactacatctatttcatttgccttcccagaccctttctcccctgacagtttggagcccccggacgctatacctgaaactatacttacaaactttagggggagctctaacaaaggctcacccaggaggagctgcgtgtcttcctagttctaaatcacacaggcatagtcattaatcctgtcagatgttattttgtttacaggaaaagaccggggctcattgaactaatcttttctaaaaaatatagtgattcaggcaaaagacatgggcacctgtgctctgagctgcttattgtctccatggcattcttctgaagggctgtgcttagtcactgaggcgggggctttctgaaattctgctggcaaaggattttgtgacatcctgctggcaagcagaatggggaaacatggtctctcatgtttgcaacttgttctcacctcatctcacccttgttctttcaagcccaggggtaggaattctctgcctccttccatggttgttagctgcagcagttttctgtatccctgttaaatatatatatatatttttttttttttctctatctgaaccaaaagtaaataaaagaccacgtgtaatcccatcctaaccaaaagggattgttgtatgtagaatatgattttttaaaaaataatttataaaaatatttatgaatggaatactttctacttaataactaagttgtttagttgggggacttcttccaagtaagtggagaatttattcatgtatctatgtagtgagaagccgctaatgtcttagcagaaaagaaaagaaaagaaaaatccttagataattatggtggacgtaaacattcagcactccctccaccccagatatatttatgtttgaatccccggaatctgtgagtatgttctttacatggcaaaagaaattttgtaggtgtgattatgtttaagaacctggagacaggaagacttgcctggattatccaggtgtgcccaatctaacatgagtctttaaaagcagagaacctttcacaatcatggtcagagagtgagagatgactaaggaagaaataatcggggaattcgactttgctggcttagaagatggagggaagggccgggagccaaggaatactggtgagctctagaagctgaaaaaggcaaggaaatgaattctctaaagtttccaggaatgattttaacttgagacccattttacacttctgttatacagaagatgtgtttactggtttaatgcactcaatttgtgctaatttgttataacagcaataacgaataaaacaatggtagcgatgatgcttatgctgattatcagaagggacatcgatatatgtaatatattacaatacactgaagccagagaaaactgtgatgctcttcagtgacttcagataatttttttacaccatgactcttcttttgtctgacattttataaaaagtgtgcgaaaacataatatttttaaatattacttcatctactttgcatccaccagaatatcctcaaatatttttgttgtgtaaatgaggccttgctacaattttagtggtgatgaagtaattttcttactgtttatataaaagattttctaggaagggagaactaaatgacaatcgattacagatattaaggttactaatgctttataatttaaaataaaattttctgaattgcaatccaggtaatccaaaacaatttacatttccacaagtagtgcatgagtgccaactgtctcatgcttttgcactaattaacatgattgcttttcaaactttgcaaatttggtgatttaaaataaaatgtcaagtagaattacttaattctgattgatatcattcatttataatctttcttattgaatatttgaagttattatttcaaaattttttgtaaataggtaatttcagcctactgaaaagattgtaaacacagtattcaatgtaactcatgtttgaaacatgtaaaactttcatagaagtagggaaaaggcaaacagaaaacggtggtttttaataactgttcaaattgctggattaatgagatgacatattaaatttgagagaaagtgaaacagagaaagatgttccatgcaagctgcatgtgtaaacaataccattttggatgaatggtctacttcattttatgtacctagggaagattctttgtgtgggtgaaagaatattcaaacacttataggaaacattgaccgtcaatatattgaaagacctgggaaaaatattcacctattatccttataaatttaactcaagctattaattgttaatctatcagtaattatcatatcaataatttataaatatataaattttaaattttcaaaaatatacaaatgtttttaaatatgcaatataatgcactaaaataaatattactgaattcatagaagaaactcattatttacttaaaaagagtttgctgttgtatttacatgaatcaattgcagatatctatttcaacctggattctctaaaaccacaatacagtagttccccacttccttaaccatggcagatacattccaagatcaccagtggatgcctgaaaccatgcatagtactaaaccttatatatgctatgttttttttcttctatatatacatacctattataaagtttaatttataaattaggctaccataggagattaacaatataaaacagaacaatgataaaaatataccataataaaagttacatgagcatggtctctttcttcctttctctttctttttctcttctctccatatgattgaccatgggtatggtaaatgaagctatggaaaacagaaacatggataagggaagactagccaagtctaagaagaaaaaatgaatagttgatttaaatagtttaaaaacatttatggcagttctgtataatgaagcgatccacataaactatagtaacttactatatgtattttactaaacttttcagtagtccatggtgttttcttgatcatatacttttcccaaaacatgaatatggttaatacaaacatataaatattacagtaggtagtcaggcagacatgagcagggcaggagagcccccccacacacaaccactcccgccccccgccaaccaggagtgtcaggcgaccatcacgtgatggtcagacagttgttaactgtatctttaaaataataattggtcacaggcagcacttggaaaaggcagtctcccagccgggcgcggtggctcatgcttgtaatcccagcactttgggaggctgaggtgggcggatcatgaggtcaggagttcaagaccatcttggctaagatggttaaaccctgtctctactaaaaatataaaaattagcccggcgtggtagcgggtgcctgtaattccagctaatcaggaggctgaggcagggaattgcttgaacccaggaggcggaggttgcagtgagccgagatcgcgccactgcactccaaccttggcgacagagtgagactccgtctcagtaaaaaaaaaataaaagaaaaggcagtctccctatagatagaaaaaacctgaaactggtgatcagcagcttccagataagatctcaggaactgggcaagtgggttcacatatgcacacgaagaggcaaaatggcgatgtttaaccggtatatgactttccagcgagtttccctttccaccagtaaagggaagaacgcctcaagtgagcatgtgtacaactccggtgaacacactgtgcatactcccctcccaagtgctagcaggccgtcatgcgtgcagacaacccaccccgagggaagaaccaggggagaaggcaggcaagaccctggaagcaggccaacatataaaaaccccaagtcaaaaggacaaaccccgcgcttgccgtttaagtcgcctgcttggtcctctcccaagtgtactttacttcctttcatttctgctgtaaagcaatttttttttcttttttttctttttcttttttttttgagacgagtctcgccctatagtcaggttggagtgcagtggcgcgatctcggctcactgcaacctccgcctcccggattcaagctattctcctgcctcagcctcccgagtagctggggctacaggtgcgtgctaccatgcccagataatttttgtatttttagtagagacggggtttcaccatattggccaggatggtctcaatctctcgaccttgtgatccgcccaactcggcctcccaaagtgccgggattacaggcgtgagccaccgtgcctggccctatttctgctctaaagctttttaataaatgttcactcctactctaaaacgtgccttagcctctccttcttccttatgcccctcagtctaattctttcttctgaggggcaagaattgaggttcttgcagacctgtatggattcactgccaataactcagatacccaccactgataacagaaacatttgttatgtttcatattttgtttatgaatatgctctgaaaatcacaattatagaagctcttttcacaggtcataaaagacccataggaaaatataaacaaacaaaaaataagtcacatagagatacagtcactaacacagaaatgataaactctgtaattctcttaacctgcagatttgtttcacattgtggatgacaaatgacatacaatgattatagttatccactgtcatacttggagagattatttaattatgctatatgctacattttcacatgaatgaattaagaaagatgttatggccaaatgcacagcatttcccacagctgcttagataagtaaataaatcaaacagttatttcctaatcacactagcaaccatggatagctcacaagaaggcaagcagtagtaatcacctccttaggctagctgtttaatttatcatggtggcagtatgaaatgcaagtctctgcaaagaatctcagtgaaatagcctctaaagcatggccagttacagtctactattagtataatcatgcaataagaaaaaatgtaaaaggtgtaattgaaatatttaagaaaaactactagtgattaaatgtgcttgatgcagtggtacagtaaatttctgaagttttgtttatttatttttgagacagagtcttggctctgtcacccagggtggagtgcagtggtgcaatctttgctcactgcaaacctccgcctcccaggttcaagcgattcttttgcctaagcctcttgagtagctgggattaaaggcacccgccaccatgcctggctaatttttgtatttttagtagagacagggtttccccatgttggtcaggctggtctcaaactcctgaccttaagcgatccacccgcctcagcctcccaaagtgcaagaattacatgtgtgagccaccgcattcagcctatttcttaagttttaaatgtaaatatctgcggttcacaatatagacagccaataaataggctcaatagaaaaataaaatttgattaaaactaactctatccccagggaactggctttcttcaggacgtttctagtaagactaggacagaatatagctgaacaagctaacagatatctggcatactctcccaatcacatgtccttcttaaaattaaaaattgaatatgaaaatctagaaatagattttctagaaacatgctgaaaaatgttacatgctgaagcattctacaagatttagtaacaattctacgtatgaagaattcaaagaaatctttatgattaacaatgagggagaatcatatttaagtaccatgcacaagttcactatccaatggaaaaagatagaatttgagttaaatctgtatcatgtatttttgaggatttccatgtaagacaggctacaagggtctggaagaactaaactatctcatacctctaacaaaatttaaattcgctagtgagattgtgaagtgaaagtaagtagcttgtcgtaatatttaaattaagcagaagaaaaacattatacattacaggtgataaatatctatgatttaaataacatcttatcttataaagttatactataaaaacttcctcctctactccccaaccattgaactctgaaatgtaaagtaaaagtattgtgtatgaaaataagactctttaggccaggcatggtggctcacacctgtaatcccagcactttgggaggccaaggtgggtggatcacgaggtcaagagttcaagaccagcctggccaaaatggtgaaacgctatctctactaaaaattaaaaaatttgccgggcgtggtggcgggtgcctataattccagctactggggaggctgaggcagagaattgcttgaacccaggaggcaaaggtcgcagtgagccaatagcacaccactgcactccagcctgggcgacagagcaagacaccatctcaaaaaaaaaaaagagaccttttttttttttaagtaggatgcatacggaaactttaatattttcaagtagagtccatactgaattatttctgactccatatctagaaaggaattcagatgacaattgtaaatttatggactgcttcaaatatagtgaggcaattaggaaatgtaaaaataggtgtcaaatatagtgaggcaattaggaaatgtaaaaataggtgtcaaatatatttcattaaaaatgaatgacaattcactgtgccattaatttaatggtaacaaagataacttttgaaaatttttgagtcgtacctccaatagaatttaagaagctattgtacatgtgaaataagaacaaaggtttatgaaaaaaatcaaattagaaaaaccatacccaagaatgagaaaaaaataacttacaacttctgatttcaagttatggtgcaggtagtgaaaaaaaagttgtaatctcaagccttaaaccagtaatgatactctctagggtatgagtaaattgatccctggtaatcaaagagtggttctcaaccagcaaaatcggtttcttctaggaactacttaaaaagcaaaatcttgagccccaccctccactgaatcaaagctcctcttatttcctcctttttacaagatttactactgagttacatgcaaattaatacagccaaatactatcctaaggccagattccagagggatttactaggctactttccaaattctctgcaaccagcaaggccagtgaatagtagccgtaaaataatgtgggtgtgaaataatttgtttactggcacaattactgatcaaatatatacacacaaaaaaaactaatatgttgttcttagaaattattttacatatcacctaaagtgtttctcatattttttaatttgcacaatcctttcttacagtcttccctacatttttgcaacctgtggctaaacagaccatattttgtactgtcctattaattgtttattttgaattgctttttgtaaatatgtgtttttacattaaggggacctccaagttattctttaaacgctccattttcttttaagcgaacattttatttgttgacagaatacaagattctgaagttggtttttaatgtctccaatttgttgtttctgttattttttgttgcttttccccaatgtcttggtaatctgagcacaggtccctggcttcagtcaccatactgactttaactatagtttaaaaacctgaaactccatctttctgagtaaaatatagtatcctctgaacaatcatcccactgaataatgaggtagaagatattttagaggtggaacaaagttacatgcaggaaaaaaacagtagatccaatctatgaataataagaatgttttaaaaaggatataacaaaataaataaaatcgtaaaattttactgttgtaaatttaaaatagaatgctttcaatatgttacagacaaaggtgatataatgcgaaaatacctcaaaacactccttatagtcaagaacacagagagtagaatctttaatggacagaaaagaatgctgtaacatctctaaaatctcaaaaagcggtttaggttctatatatgaaaatatatatgactcaaaaagcaaataaactttccaaattattatcatgaaggcttatgtccaaaatataaactatatcagcagaaaagttttgaaaaatatattttaaagaatcatattaaaaaatagacaataactagtaaatgcaattgaatgcacaatttcctaaataattgtttagaatatggttggcagataatggaaataacggggcagttgatggattgacaaaaagtttgtgctatttatttaatatacatacaattgggaaagttgaaaattaaaacttctatttacaaccaaaaagaaactaataaattaggaaaattacatgaagtagatttttaggaatataaactaggatattcagatgaaaataaaacattttattagtcaacaaaaagcacatttaaacaatgtaatatcaggttacatccaaaataaaataaacatagaaaatgtacatattagcaagaaatggtgaagtgaaaagtttaggtgttaatgctaacagcatgaaatgatccagccatttagagagcagtttgtcactatttggtgaaacttaactccacaatttctttcctgggaatatacttcataaaactctagcataatcatagaaatggacatgcgtgagaatattcattagagtattttatgtgatagcaaagtctttcaagaacgtaaatgttcatcagttcttaaaaggatagataaaatgtggcatacgtgcaccatgtaacagtgtaactttcaaaatacatttaaattgattagtttttcatggagcaatgttgatttatttatatttattttttgaagacatggtcttttttttttttttctgagacggagtctcactctgtcgcccaggctcagtggcacaaactccacacactgcaagctccgcctcccgggttcatgccattctcttgcctcagcctcccaagtagctgggactgcaggcgcccaccaccatgcctggctaattttttgtatttttagtagagacggggtttcactgtgttagccaggatggtctcaatctcctgacctcatgatctgcccacctcgacctcccaaagtgctgggattacaggcgtgagccaccgggcccggccgatatggtctatttttttcaaccaggcttgagtgcagtggcgatcatgacttatggctcactgcatcactgtagctttgacctcctaggctcaagtgatcctcccacctcaccctcccaagtagctgggaccacaggcatgtaccaggatgcctagttaattttttggtattttttgtagagatggggttttgcctgtgttgcccagctgttctcaaacccctgaactcaagtaatccgcccgccccggcctcccgaagggctgggattacaggaatgtgccaccgtgtttggctagaaatgttgacagttctaaagaaatgttgaataaaataagtgacaaagagaacaaactttttagcacaattcataaatgtatattacagccagtacacacacacaaaattaacagtacataatgtttatagatttataattatgtaaatagatttatgattattgtcaaagcacaaaataattacatatagttcatttctgttgggaaaaggccatgtataagtcataatatgtgcatattggcagccattgattacagtggtaagaattactttgaattttgggtaatcattttctctaatggcattatattttcccctcattgaagaattttgcttcatcctgcttatttgggaaaatatattttggggagggagggaatttttaagaggcaaagcaaaaaaattataatgtctgattatagcattatattgctgacaccttgggtgaagtgaaagtggatctcaaatcttaaaggaatgtgaacgaaatgagtacttgaacccctgtggatagatgtagaaaaattaaaggtatttgaaaattttagtagctatgaaaagtgattgccattgtgaagcctgctgttttcttttaaaacatggcaataatgtataaattaaattgcaacaggaagttcatattctagaatactcagttgttctgcatgcagagttggataaatggaaaatatatgataattatacagcataaggggtaaagaatttctaatcagcttaaatgttttaaaattagccacttacagaaaaaaagagcagttaattttaaaaaatcaagctaaaaggagttaatttcaagaaaacaggattcagataagatataatggcctagattataatttaataaaagtaaagagtatgcttttttattaataaatatgtttttataagttaaaaagaaaatgattacagtagccactttggtactttaagctgaaggcattatgtgaccatatagtgaagtagttttaaaaccaacccaattttcccatagaactgaacggtttcttttgaatacacctagaaatggactctgtcagtcttgaaatatgagaaagttacatttgtcttatctgagtttctttctcaggagaccaactagcaggcctcccaaatagtatcaaggaactgaaacttatcattgcatctggacaatgagatgtcagacttctcccctagcatgattgcctaaccgaccacctgtttcctgttgaccaactcttcctcattacccctccctaattcctgttccttcaggtagttacatttccgctatataaattcctaattttagttggttaggtaaatggatttgagactgatcgcccatctcctcagctgcaactcctaattaaagcctcttccctggcaatactcattgtcttagtgattggctttctgtgcatgagtagcagcatttaaacagaacccctggatttttggttagtttctccttacaaagtgaacattacagatatgtattattagtgtggaatatgttaagatgaagatcacttcctctctaaaatatattaacatttgataacagttataaatatttccaaaatgttgctccttgatgtgaaacttcgattacgtaaattaatagcctttaatactgacactcgtctagagtaacagtttgacagtgatattgtcctaaattttaggtagcaggttgaagattaaaatgattaagcaagtcgttcaatatccttgaaaaagtctaaagaacggataaaagattgcatcagagattaaaatataatgataaaggcaaattgcccaggaaaaatgtaggatgccccagatgtttattgtcagaaatgaaaaatacatcatctttgattaacacgtacttaaagcacttgtgaactaactcacagcagctgatccctagaatactttgttacctgttactataggtgcttactcagcttttccttttattgtattcgaggatgtttttgaacacagtccccagagaataaagcgacagaacccttctctctgcttcatggttaggactctcctgttaactttacctaaagaacttcagcttagctgggcaggttccctttgtcccagttaagttgggaaccagattgagcatttaataactgctttgggatattttttataagggaaggtctttcaaataaacatcaagatttgatgaagtacaggttgtgtgactacagccaagcagatcatagggattgaagaaggaaaaaaaatcagttactattatccttagatatcagcagaagtctgttaagtcaaaactatttcatattaagattaacatggtatttttattatttgtctttatgttgacatttagtttgatgatgcaaaccagatgtgagacaaaactgctggtgccttagcccaaattaaggtaatgacaattgacctagtagccatgtttttcaatgttacatactcagataaaaaaaaaaaaagaaaattataaggtcagtttcagtaagaaatacccattataaaatagggaatatatatgaatatatgtatacatatatataatatatatccatacatatgtatgcatatatataatctcaatacattttaatatgccatgtgatgaaatgagatatacatataaagaacttatgcttcacaccaatagatgttttgagaaaaagcactttggaaagtatcaaaacagacaaactgattattcagaagtggacatttgacagatattctcttgaaaatgaatgaagtgagcctatcactttaaaaaataaacagaatttttgccaatgataaaattagagctttcaagtacaaaacctagtattgcagaaaacttgtatctgccttcttaaaattgacatgttctcgatgcttaaggaattttctgatgacattggccatgatattaacaatgaacatgatcttgatgttgtttaaccgaagatgtcaacatttggaagatctgcagaattattgaaccaagattattcaaatgacaatataaaaatcatgcatagataaaattcgaagagcaacacagatcagtagtttttgttttctgtttttttttttttttgagacaaggtctcgctctgtctcaaaagctgcagtgcagtggcacgatctcagctaactgcaacctctgcctcctgggttcaagcgattctcctgcctcagcctcccgagtagctgggattacaggcgtgagccaccgcgccgagctaatttttgtatttttagtaaagatgaggttttaccaagctggccagggtggtctcgaactcctgacctcaagtgatctgcccgccttggcctcccaaagtgtaattccgaagtgttgggattacaggaatgagccaccacacctggcctcagatcagtagattttaaggaaacaatacagaaaacgttctctgatatggttttggattccacattgtaactaacccttaagaaactacaaatagtcaagttttggtatagtattaaagttgaatagtcacaattatctttaaaatttgtttaaatacttctttcttcttcaatgttatacttatgggaggcaaggttttttgtgttatgtttttctgcatatacttcaaacaaatagcatattgaaacattttaaatagagaagatatgaaaattcagctgctttctattgtccaatatttgacagatgtttaaaaatgtgtaacaatgctactcttcacactaaatttttgttataggaaatagattttttaaaaattcttcttaataaataatagtgttatttttaaaagaataaatacattcatgtttctcagttttaagctttaatatggcatgtattgatagatacacctcacataaataaaataactttatggttttcaataatttttaagagattatgtggttgtcaattcaaaaatttgagaactcacctagtactactagattggtttcattcctttcataaaactttttaataggagatacttactcacttttcaaatgctttgtatgttaacttacctccaacttttttatttggacattttcatttgaatacattcattcctgttgagccaaaaacaatttgaaattttgttaattatttttattattctaccattttcttactataatttaattgctagttatttggtttctataggtcggtttttttttttagtatacattttatcactatgccattactctccttagattcttcaatgatagttttctaaaattctaccctgcataattaaaaaacatacatcttctggccagatggggtagctcatgcctgtactcccaacactttgggaggttgagtcaggcagatcacgaggtcaggagttcaagaccagcctggctaacatattaaaaccccatctctactaaaaatacaaaaattagctgggtgtggtggtgcacacctataattctagctactcaggaggctgagccaggagaatcagttgcacctgggaggcggaggttgcagtgagctgagatcacgccattgtactccagcctgggcaatagagtgagacttcgtctcaaaaataaatcaaaaacaaaaccaaaaaaccttcatcttctctacttttttgtcttattttttgattaacttaatattttttgcctttttttttaccaatttgttttaaatctgtagtttacatgcataataataaacttgatgtgtttcttaattcactttaacaactccatatttttagattttaattagagagcatttagtgtaatgatgaatatgttttaatttctccattaatcaattaaaatgtataaagagtaactgggcaagtaaaatagaagaagaggcactgcagatattcaatagattttctgaacaattttatcaagaagaatacaagtatcggaatgaaaaggtctagtgtgtaatttttctgggtgatgaggataatatggagaaaatatcactgtacaagagaactcaaccaactgaggattcaagatgatggtttatctatctacatagatattaaagtctttcatggatggtaaaatggcaagtacagaaacagaaactccgaaaaagagagagaatccaggtgagggatcttgagcagttgaacacagcagacctgactgattcaactgaaaagattcatttcggttttggctatattttgattaatatcattaaccaaaatcttcaattctgtttttcacatctattaaattagttgtgctcaatttatagtttccgaaaatagttgcacattgaataaaaaggttattttacttatactaacaatttttcatagtttatcttagtttgacctgaaaattgttattttttaaatccctattatgacacacaggagaagctaccacaagatctagcctacgtgagaatgtgggacatttgttcaaaattattaagaatgttgtcagtgacagtagagcattaaaccaaatgcgggtttctttcttatcatgaggcctgtgcagctacacaaatggcatgcctataagggcagccctgatgccgaggtaaatatttacaaatcattataatacaaattataatgaattgtattatcttgatgcttcagtgagtttcttttttgatactcaggcttgtctctaccccatgcatctaacacttgtcacttctgcttagagagaaatctaccattgaagaacgagagaaataaagaaataatggggtaaatatcaaaattctactgctaaacactgccatgtcttgagctatcacttccttcagttgtctaaatctgataaacattccattatagaacgggtaagacagaaccggagtggaaaggaagcaagaaaactgatactggtgagaatttctatgcagaagaccttgccctgaacacaatcaaaggtagcttccaggagaagacacagggacaccagataaatttgaagaaataagcatcgaagagaacaaagtcatggtttcttagaggccacattgagacacaaggtctctaagtcacaaaagtgacaaagttgtagagttggctctttgtgataaaaaagggggaataattctcaaactcttccataaaaccaaggaaaaacatggagggtgagtgaaactttccgtgcccattaagtggcctgagatgttgctgagtgagtgcatggcctggagaactcttttagtagatggggagctcagttgccataggtcctttaacagttgccaacatggaggtttgatattacctgacaaagagtgaaacatattatctgtattgttcctttctaacgctgatattaaagacatacccgagactgggtaattcataaagaaaagaggtttaattgactcacagttctgcagggctggggaggccttgggaaacttacaatcatgacaaaaggggaagaaaacacatccttcttcatatggtggcaacaaggagaagtgcagagcaaagtgggagaaaaggcccttataaaaccatcggatctcatgaagactcactcactatcattagaacaacatggtggtaactgcctccatgattctgttacctcccaccaagtccgtcttgtggcacatggagatcttgggaactacagtttaagatgagacttgagtggagacatagccaaaccatatcattatttcaccagcagccacttcaggcatatgaagacatggttatggtgaatagaagtaggcatctccttttccatgatgttacagggcttggtaaaccttcagttatttagaattaaccctaaggaaaagtgcttaaaatgacatgttttccagagatattataaatatattttcttcttttgatataatgaggacaaacatattccttaatttgaaatctagaaaaatgactccgtcatatgaacattggaggttttattttaaaaattgtatactcattccactgacatttgtctttttgtccataaaacacatgctttaaaagtaaatggttattcatgtcagtatgaattgggggaatactaatatcataaaaagattttaagcatcacctatgaataaatactgccataaccttttataattacctaaatattgttaccattatataataaattgatgaatgtaaagtttatcatattatggcagattcatagaataattttatcaaagatataaacctattcttaatgattctacatgatatattagacaaatttttttaacctcaggacaacacgtatttatattactttttctgtgtttcactcaatttttattctgctatgccaacagcaaataatgttatttgctacttgtatttatgttttcacttttattatgcctatttcaaaataattcaaaggttaatgcattgaattattatgtactaaaatgaatctaaactactagactgctgtgaatgaaaaataattctgtgtaatatatatttaaatcatcaaggcagactgattttaggcttatttgtcatataaatttaatggggaatgcatatgtgtgtcacagaatctttctataatttttttaagcaagggcataaagcatatttagtataatttgataatgtacagattctaatacctaaaaatttaatatctatttcatacaaataaaataattctcacattatttttaaacagagaattaaaagtacattgtcatagaaacaaaggtctaggaaatgtaagctaagtttttaattactgtcttaataaccatatagccttgcataattttatctattatttccataggatttggggaacaggtggtatttggttccatgagtaagtttttttagtggtgatttgtgagattttgatgcacccatcacccaagacgtatacacagaacccagtttatattattttatccctcacctcaccccacccttacccccgaatccccattgtgtcattcttatgtctttacatcctcataccttagctcccacttataagtgagaacacatgatgtttggttttccattcctgagttacttcacttagaatagcagtctccagttctatccaggttgctgtgaatgccattcattcattcctttttatggctgagtacaattctatcgtatatgtataccacagtttctttctttttttttttgagacagagtctcactctgccacccaggctggaatgcagtggtgcaatctcagctcactgcaacctccgccttccggtttcaagcaattttcctgcctcagcctcccgagtagctgggattgcaggtgcacaccactacgctctgctaattttttgtagtagagacagggtttcaccacgttggccaggctggtctcaaactcctgacctcaagtgatctgcctgcctcagcctcctaaaatgctgagattacaggggggagccaccgcacctggcttataccacagtttatttttccatttgttgattgataggcatttggcctggttccatatttttgcaattgcaaattgtgctaatatgaacgtgtgtgcaagtatctttttcatttaattacttattttcttctgggtagataccaagtagtgagattgctagatcaaatggcagttctactttagttgtttaaggaattgtcacaccgttttccttaatggttgtactagtttacattcctaccagcagtggagaagtgttcccttttcaccacatccataccgacagctatttttttttttttttagtatggtcattcttgcaggagtaagatggtattgcattgtggttttgatttgcataaccctgatcgctactgatgtttgaaaaagcatacaaaaacataaagtgcagaaaggacaccttatcaacaaatggtgctgggataattggcaagccacatgtagaagaataaaactggatcctcatcttttaccttattcaaaaatcaactcaaggtggatctaggacttaaatctaagatgtaaaactgtaaaaaatctagaagataacatcagaaaaaccttctagacattggcttaggcaaagacttcatgaccaagaacccaaaagcaaatgcaacacaaacaaagataaatagctgggattcaattaaactgaagagcttctacacagcaaaaagaacagttggcagagtaaacagacaacccacagtgtgggagaaaatcttcacatttacacatctgacaaaggactaatatccagaatctataaggaactccaacaaattagcaagaaaaaaacaaaccatcccatcgaaaagtgggctaaagacatgaatagacaattctcaaaaaaaaaaaaaaaaaagacatacatattagtccatttttatgctgctgataaaagacctacccaagactccacatggctggggaggcctcacaatcatggtggaaggtgaaaggcacatctcacatggcagcaggcaagagaaaaaaatgagagccaagtgaaaaggacaaccccttataaaaccatcagatctcatgagacatattcactaccaggaaaacagtatgggggaaatcgtgcccattattcaattatatctccctgagtctctctcacaacgtgtgggaattatgctagaagagtcaaacatatttttgataagctattaaccattaataggcaaacttattaactaaaactagaaataatttctgtattagtttgctagggttaccatttaaaaaaaattataaactgggtggcttaaacaacagacattattatttcataggtctggtggttagtagtttgaaattaaggcaacagcaaagttggttccttctataggctgtgagggagaatctgttccgtgcctctcttgtagcttctagtggtttaccagcaatttttgtcatttcttggtttatagtagcataacttcaatctttataagtcattctcccctgtctatctatgtccattttgcccctttttatgaggatactagttctactgatttatgaggacaccagtcattctcccctatttgcctgtgtccattttgcccctttttatgaggacactagttatattggtttagggtttactctaataacctcatcttaacagatttagatgcaaaaaccccatttacaaataaagtcagtagtgattagagcttcaatttcttttgggagacgcaattaaacccacaacagttcatttttcaaatatagtatatctcagctatttagttaatgtcagaccttcaaaagttgaactactgtaacttttccaaattcacgtcatttgctatatgatgtgattggaggtgaaaaaagagttttcttggtttctcaacctaacctgttgtccaaacctagtttccctgaaagtattgctttgagaatttcagcatgagtccagtagttgttagtctttcccatttactattttgggattttgggagtgtcctatagggaagaggtgtgattaataggaacttctttctgtggtcctagaaaaatatgatccagggatatgtgattctttatcatgtccttagcaagagattatgctttgaagtgactaattactttacaatttttcaaaatgccttgaaaagaattgctggttaactgcagaattatttccatctccaacaacaagaaattatataagaaaacaagtattcaggcaaagggcattgcaaaggatatcattgtcttcttaagagacataaaaaacagtgtaatggacctggttaaagtcaaccacacaatattaatagttaaaaaggtacatgacatttcatcaaaggatccacaagcctttgcaattgcagtaataagccttgaacactcttttacactgtggagtgatgagtgagaaaagagggaataagggagttaaatcatgttatctcttatctctacctcctcctgaataaattgacttttattttaaaagcccaggtgtcaagaatagctaattagcacagaccatatgctgaaattaggagaactggaataaacaatccataattatggagcggtttttactttctttttttctcctttgaatttcattttaatatcttatttgattttatgggcagggccaaacaatttaaaataagagctcaatggaaaagaaatttcagctggggaagcctagttcacttaatgatttcagcattactttatacctgattcttgggcagagaaagtaatatgaagagaacctcgtgtctggcagctattttccatgaaatagtctacatgaccttaaccttgactaagcatgtgttttctagatcaaggatgctgctgctgacagaatttgtgaagaaattggcaccttacaaaactttcttaggtcaaaagaaaaaatcttttgaaaatatgtgatgttgaaactacaatataaatgatgagacagtgtcatccagttgaagatggagaagtggtatttcaggaattgaaatcgagccaagggaagacttgatgtgtttagggaactaagagcacttggataacatacaggaagaggagagttttgggagattgaggctggagaggaaataataaaaatgcaatagcatcagtcttgctgacatctaatgtaaatataaatagtcagttacaggctacacaagaaaatcctgatcatacaagattatgctattcaaaatgctttcccctgccaggataccctaagttgaaaagaatcccaaaacatagttattaatatacagataaatgtgtccatagaaaggaaataaagaagaatcctctattataccattctttggagacacaaagagaatggggacaaaggtaaaaaaaacacactgatcgtcactgcaagtctacactgcattagacattttgttttgtttgcttgcatgaattagctcatgtaatatcacaacaatcttataaagtaaatgctatcattattttcattaaactgtccaaagttacaaaactggcttattttatatctgaagtaagaacgaaaaaactgtggttccaaaaactgactaataatcatatgctcttccaagaagcaatggtaaattaggagtctccgtgaaaggcagatatatcctgttatttaatacaacccctaattttaaaggactaacaataacatcagtaatttctgagtggtgaatgctttatttttttcttgtgattgtcatacacttcccctacattagagacaataaatgtagtcttgtttggtaagtgagacaaacagaaatagatttacgtatgttcccacagttacttagtggaaaaactagacaactaatgttttaattgttaatctagtgtaattccgattgaaccacattaattcaaaaaattcccaccagttgttgtttggcctaaaacacaataatgctgctgaccaaagaacacaaaatacaaaacttttaaaccttgtcttatccataatttttatacatctccatagctctacaaccaaaatcatctgtcatattgtgctgatttcattcatacaaaaacagaactcaatgtattttaaggttataccttcattattacgtttggttaaaacctcagctcaatgatgatgaactatagttacagaaaattgtcagttaatcttggttttaaaattaccagcatctagtcagacgtggtggctcatgcctgtaatcacagcactctgggataccaaagcaggtggatcacttaaggttaggagtccatagaccagtctggccaacatgaaaaaactccgcccctactaaaaaatacaaaaattagccaggcctggtggcatgtgcctgaaattccagctactcaggaggctgaggcaggacaatcacttgaacctgggaggcagaggttgcattcagctgagatcgtgtcactgtactccagcctgggtgaccgagcaagacttcatctaaaaatatagtaacagtaataaaaaaataaaaaaagaaaagaaagacaattaccagcatcagagtttgaaatctttttttttttatttttattttttgagacacagtcccactctgtcaccctggctggagtgcagtggtgaaatctcggctcactgcaactgcgaggtggcaacgtgctagcagcctttgctcactctcggcacctcctccgcctcagcatccactctggctgcgtttaaaaagcacttcagtccgccgctgcatgatgggagcccctcgctcgctgtggctggagcctgctccctctgcttgcaaggaggtgtggagggagaggcgcaggcaggaactggtgctgcgcacggtgctcctgggccagtgtgagttccaagtgggcacgggctcagcgggccctgcactccgagtggccggccagggctgctagccccgggaagggaggggcttagcacccgggccagcagctgcagagggtgccgggtcccccagcactgccggcccgcctgcctgcgtttgaattctcctcaggcctcagccgcctccccaagggcagggctcgggacctgcagcccaccatgcccgagcccaccccaccatgggctcccacgtggcccgagcctccctggatgggcactgccccctgctctgttgcacccggtcacactgactgcccaaggggtgaggagtgcaggcatgcagcgtgggtctgacgggcagctccgcctgcggccccagcgcaggatccactaggcaaagccagggggactcctgaattgggtggggacttggagaacttttatgtctagctggaggatggtatatgcaccaatcagcactctgtgtctagctcggggtttgcctatgcaccagtcagcactctgtacctagctaatctggtggggactcaggggaacttttatgtctagctagaggattgtaaatgcaccagtcagcactctgtgtctagctcagggattgtaaacgcaccaatcagcactctgtaaaacggaccaatcagatctctgtaaaatggaccaatcagatctctgtaaaatggaccaatcagcaggatatgggtggggccagataagggaataaaagcaggctgcctgagccagtagcggcaattccttgggtcttcttccctcctgtggaagatttgttcttttgctcttctcaataaatttcgctgctgctcactgtgggtttgcactgcctgtagcagtcactgtaaaggtctgcagcttcacttctgaagccagcaggaccatgaacccactggggggatcggaacaacttcttgcctttgagagctgtaacagtcactgcaaaggtctgcagcttcactcctgaagtcagctaaaccaggaacccaccagaggaaagaaactccagacacatctgaacatctgaaagaacaaactcaggacactgtctttaagaactgtaacactcaccgtgaaggtctgcagcttcacttctgaagtcagtgagacgatgaacgcatcagaaggaagaaactccggacacgtctgaacatctgaaggaacaaacacaggacacaccatgtttaagaactgtaacactcaactgcgaaggtctgcaacttcattcttgaagtcagcgagaccaagaacccaccaattccagacacacaacctccgcctcccaggttcaggcgattctcttgcctcagcctcccagttagctgggattacaggcgcttgccaccacacccagtttgtgttttttttgtatttttagtagagacggggtttcaccatgttggccaggatggtcttgatctcctgccctcgtgatccacccaccttggcttcccaaaatgctgggattacaagtgtgaaccactgcacccggcctgcaagcatctttgatctttgcagcagtttgctaatgaaatcaataaacttaacctggacttttatcttcagaattatttccaatagttttaattaaacattttgctagcattaataattcactttttttttagtggataaattaacacatgttaactgcttatggctaacagatgtagtgttaacaaaactctagtttccaaagtaattttgtcttttgtcgctgatttcagaaagtatcaactcttgaaatgaagacagatgaaaccattttaggaaaaaataaataggaaaaaagaggcattaatcatcaaaacaaaaagatctgagcataagaacaaatattgtggtaagaaaagtttgatagaagagcaaatatttggcaagaaaaatttaccattgtttcctggaagggcatagtgattaaaatctcatctttggggaccagactttttaaattttttgtgtctcctaaaaagaaggtttgttttcattatgcattttatttttctattttcaagtcattctaaataaaattaggaacaaaatataagttttatggttcctatgcttcgtctatatttaaaaatatattttaaaaaacttatattttctaaaaattaaaaggaggcatactgtaactacctgatggattcttcttgcccactgtacagacaaaatcaatctaataagaacatggcattcaatgaaagaaagattttagttgatgcaaagctggccaaaacatgcaggagatggagtttttacttatatcaatctccttgaaggctggaaggttaggggtttttcaaacataggttagtgggcagagggtatggggagtgctgaattctaagtttggagatgaaatcatagggagttggagctgttctcatgcactgagtcggttccagggtgagggccacaggacgagttgataagtctgggttggtccatttggttggcagaaatgcgaaaacctaagaagacatctcaaaaggccaatcctaggttctacaatagtcatgtcatctgcaggagtaattagggaagttgcaaatcttgggacctccagtccatggctggttaattatttaactacacctacatcttagtagaattcatgtccttctcattctcctaacttggtggcctttcattggtttcacaagggcagtttagttcttgggaagggctattatcattcaaactataaaataaatttctcccaaagatagcttggaccatgcccagcaatgagcaaatataaccaacctgtgagactacaagcaagatggagtcagctgttcagaattctcttactgtcataattttgcaaaggcattttttcaataccttttaataaattgataagctgtatttttttgtagatgtttcagttttctagttataaaattatttgagcaacatattaagtactcagacacagttaaagtaaaaatactaatatttattaatgtctacttttttcttaactcgttaaagtaaaaatactaatatttattaataaatgtctacttttttcttaactaggttgcttatctgaaagaaggaaaccgcctttgcagaagtgaaagaaacctaacttaactgactccatcttgcttctaccttccaagctgtccttgttcattccgggcataggctgaacaaactttgggagaaacctagtttatagtttatagtttaaacaaagatggtaacagcccttttccaaagcggacctccttcttgtctgggaactagagtgcctttgtaggactaatattagccacaatattagagattatggtttaggagtcatgcagctggaggctacaagattctgaccctctctaaactgctcctaagaacactgagatatttttcagaccctgcacttgatggatcagctggcaccacccagatcaataaactggctcatctgatcttgtggcccaaacccaggaactgactcagcagaagacagcttcaactcacttattatttcatccctgatcaatcagcactcctggctcactgcttctccccacccaacttctaagttatccttagaaactctgctctccaaatgcttggagagactgatatgagtaataataaaacttcggtctcccgcacagctggctctgcatcaattactctttttttattgcaattcccctatactgatgaattagctctgtctaggcagcaggcaaggtgaaccccttgggcggttacaacaacatattgtgcagatcactatgatgcaggatttttgcttctcagttcagctaaatccatgttcttgtctcacaaccaggaaaaattaggcacaaggacacattgaagagtgagcgggtggaatatattaagtgaaaggaaagctctcaacaaagagagaggtcctgcacttaggtttccacctcacaaaattgaatgccaggttaccacacactagttgaagaggcaaggctcctccccagcataaggtgtgaatttctggtggctatactctattcaccccgtgcatgtggggaatgcccaaacaagacaagccccctatgcaggttcccctatctgcaaaaacctggtggaaagacttgtgggatgggttggaaattctccagggacctttctctatttgcctgagcatttggctgtctcttgcccctatcaactattcactacataaaattagttccttgcaagtattttcatgcttatcccaaagcttgtgtagatgacacttcatttcagttaatgggttctgtgaaaagttttccttaaataagcaagaagaaaaaaatgctgtcttttcgatctagaacgctcacaccaatcataaaaagaaaaatcaacttgtattaaattggttctacaaaagatatgttaactggaacagagttcaatatctatagaaaatgttagatggaaaccaaaacttgaacattgtttttaattaaaaaaggctcattagttttgagtttgtcagcacaataacctaaatatgtctgcaaaataacagagtcattatcattgaactatatgtagatctgaaaataagtatcagtacaacaggcttcccccctctacttttttccttcctgccctacccacgaatagagaacaacttctctttcacctgtgccaaggattaggagaaatggtaaattattagtttatatatatatatatatatatatatatatatatatatatatatccaggaattaaaaaattgcatgcaaatttaaaacaatgttctacagcagtaatttaactagcattagaaggttgaagacattagtatataaaagttcatttgatttaattcattattttaagctagaaatttactcccgtgcaattcacttttttcctttctttttttcaggtgtaagtacaaactggaaaaggatatttaattattaatttagaagagaaaaagttgtgcagagggtgagctaacatagatggaagaacggaacgtaaatatatcaattctgccgtttaaataagaatcaaactggcctcaaaccacagcagcgtaatttccatagagaaaaaagtaaaactcgaataaaagaattaactaaataaaatacacccaaaaaaagacaaaatcaatttttatttcaagtgttcatggaggagataagtatagatctcaggtagtctcattaagcacagttttcagaaattataaaaagttgaaatattgcagacaagactatgtgattatattacactaaaataaaatgtcaaaaacataagcacatataaaaactgttactaaaaataacaattatatgatagctttgaaaaccatattaattatttgtggatctaatacatttaagtctatctagagtaaacatgcacacacacatatgtataattaaaacattacatagccatcctggtgggaaatagctaaagctgagcacagaataagagtaacagtattaaatatttttgttaatttaattttgtttaaataaactcatgaatttcaacatttagcaaagaaagacaacaaagactattacaacctaagaaagcaaagggggcataaagcaaagggaggcaattaaacataaaggtagaaaatagccaattaaaggcaataatgtgatagaaaccatataaaaattgaaatgcggttatctgataatcaaaatattagctaacagccaacaaatacataaaaatgcaacactcaaaataagagatggttattaggaaaccacaacatatacaaataattaaataatcgaaagattcctttgcccaatgctatttaataaatttaaggatcagaattaaatggataaaactgtagaaaaatagaacataggaaacttggtaaaggaactcaaatataaaacggtgtagttaaagtgacgggtcataactaaataaattcattttaaccacaatgcaaaatttatcttaagcagaaaaggttttcaatatttcacctttttaatacccttgatgcaatttaaatattcaatttcaatttattatttcaaaaattatcgttccatgcaaaaatgtgagtgttttattaccctatattttttcagaaactgatagttatgaactgaattgtgcccctccctcaaattcatatgttgaaaccctaatccgtaatgtgactatatttggccataaaacctccaaagaggtaattaaggtcaaatgaggtcacaaagttgaggctctaattcaatatgactaatgtcctcatagaaagagggagagacactagacatgtgacatgtgagaatatagtcagaaggtggccatctgtaagccaaggagagaggcctcaggataaaccaaatgtctagacactttgatcgtagactttcagccttgggaactttgagaaaaaaatatatatctgttttataaaccatacaactggtgataatttgttatggcagctcttgcagactaatatgctgataatagaattcaatacaaatcgcatgccttttgaaatgtttaaagttcagccagtcatattcaattatgattgatattattttcctaggtggaaatataatactcttacattggaatatataatatttagcactaagtgtgaatgcatattttaagagagggttacaatattgaggtacctatttaagataataatactggacactttctacagttgtttaatattattttctctaagttcaattatttttatttagggcaaactggaactgcagtactattctagattaccgggatttgttgtttcaataaaagcaaaagagctgcgtttgatctaacaatgtttagtgagtgccttctatatatcagacttcgttctaggcactaaagacatagcagttattgaaactgagtcagtctctgcttcagtataacttgtatgtaatggggagacataatgataattacatgatgtatcagctggtgcataagcactgtgaaaaaaaatcaaacaggataaagggaacatttggagtgccactttttggtttataagggactccttagagaaagtggcatctgagcagaaaaatacattattccctttatattttatcatcacttgagttgtattatttgttagtgggaataattgtgccagagactgtttcaatatgacatgaccaatcagaatatccaaccttcctagagtgttttcccaaactgtgacatggagtgaacaagagttgccagattcttcagttgcttcccaatttgccaatacgatttggggaaaaaatttagatcatgtgttttagggccttagttatccagaacagaaaacaaatatcttgaggctagagattgtgctttcatgtccagttttagttctcatatcttccttctgaatagataagaggatatgaaaaataaattaaattaactggtaataaaaaaaatgatagaaatttctgcatcaagtttattaacaaaaaatatttttgaatcttatgatagtgtgtttcagagggaagacttagaaaacgggaaaaataaaaaagaacaatgggtttggtgaaaggaaaatttctgcactgagaatgagtttagattacatgcttgctaagacagcttcttcctttaagagtcgcagaggtagataatggagaggtagagaaaagagacggggagggatgagagggtaggtgggaggaaggacaaagagaagtggcttaaagggtacagacatacagttggatggaagaaaaaaattcaatgtttgatagatgtttagggtgactagagtcaaacaaaaatatattgcacttggaaggcggacaccctaaatactatgacccgatcactgtgcattatatacatgcaataaaatctcacatgtacccaatttacttgtaaacacttttttaaaaaaataattaaataaatgcttgctgcttaaaaaaggaaaaaaattgaaaacgttattttgaagacttgtagccaagaaaaattagaatttagctgaaactgtagaaaataataaaaagcgaaaacaaaattaggcaaactagaatctaataacaaatgtactctagttttgaaacaatgttttctctctccagtctcccatttctactaaagaaaaatcatggtaggactggtttgcattatcatacttggtctaattattagtatacagtgcagcaagaataattattttttacataggcttttaaattggctttgatggaactttgttccataggaggaatctcagataagacatttttaaagccgggcccagtcatggatttgcgccatcaaatatccatgagtggggtgaatttcctctcctcttaaggttccaagatcaacgtgtagcttctgtgcctgtcagaaagtgacattctttacttaccacgggtcagaaaccctgtacagggactgtgtacacaaaatatgaggcaaatttttccaaaggctttattgtctccataagtcaggtttgattccttaaaggaaagcacaccaggccaggcgcagtggctcacacctgtaatctcagcactttgggaggccaaggccagcagatcatgaggtcaggagatcgagaccatcctggccaacatggtgaaaccccatctctactaaaaatacaaaaattagctgggtgtggctgtgtgtggtggcatgtgcctgtaatcccagctactagggaggctgaggcacgagaatcactgaaacccaagaggcggactttgcagtgagccgagattgtaccactgcactctagcctggcgacagagtgagactctgtctcaaaaataaaaacaaaaaccaaaaaaggaaagcacaccattccagtcaaagcctacaaatgaaaacagattcttattgcacttatgcaaataactgtattgccataagttaagaatactcagagtttccaaattctggagaaatcaggtagagagaaacaaatatgctccaaattttgttcatgggagtatactaaattattaaaagctgtcattagctcgaaagaaaagtttcaagatgctgaaatacaaaacaaaagatcagcaatgttttaaacaaaaagtcaaaaggattagtctatgtagttattccatgttctgcttgatactcatgaacattttagctctccatgagtcctgaaagtttttcctctattctgatgtcataatctccaaagttatcagaaacctgcattcaagaacacctgttgaagttttatagctgattataaaaccaccttctaaggagaactaaagcaagacaacaattatccacgaatgaaaaaaaaatggttttaaggcagccatagtcaaaagacacaattgacaaagaaacctattacctctgtggcacacaacaattttaacataacaattatgataattactgataatttacactaagttttatcagaattaggagtttcccataattttggaacatataccaataaaatatttatacaactacagcacccccccacaaaaaacaccatttcatattagataatgcttcctgtataatttttataccaaataagccaaatcatgtcatttttggattttagggaacctaatattttaaaggattaattagattagaaaaagacataatttataacttgattttggaaagtctgaaatgtaaatggtttaaaatacttgatattacaaaataggattacagatcattgtaaagtcatttatttaaccaaagtgataatgcaagcatttcaaaaaagaaaaaaaattttattctttgagagaggagacttaattttctaaataaaaagccgtgttaaaaaagcaacatgaggccgggtgtgatggctcacacctgtaatcctagcactttgggaggccgaggcgggcggatcgccgcctgaggtcaggagttcaagaccagcctggccaacatggtgaaaccccgtctctactaaaaaatacaaaaattagccaggtgtggtggtgcgtgcctgtaatcccagctactcgggaggctgagacaggagagttgcttgaacccaggagatggaggctgcagtgagctcagatcataccattgcactactccagcctaggtgacaagatcgagacttcatctcaaaaaaagaagcatgaagacaattatatttgtttttcaaaattttgcaaacaatctataaagtttaatcctgattatcaaatgtaacttctgtaagccttttataacctttataacctttattaagtagttggttaatgcttaaagaaaaacttgttaatctgacacaggagtccatattctaatttttcatcagtcagcctttgatactaatgattaatttatagaggaactaaacttattttatcttcctaaaatggcccttacaattttacatgcccactacttccacgatagtctctgggccttgaggagttaagtagctttaacttcttgtcctgtgtctcaggaatgcagttcatttagattggcatcttctatgggacctgaagatgaggctttaattgctggccatgttgaagaattagccggacttggtgtcctttttagacccaggagttaaagctctgtaactcaatgttacaaggactttgaaagcatacacagggagatacatgtatgtaataaccttaatttaaaaaaaaaattatctcggttgttattttttcctaagcaaaccaaaacttaataacatgataacttgattatataaaagcatattttttctatataaattatcttattctgacttacactgagccttcatgatatgattggattttagggtttgctctgaacatccctcctttataaaaaaacagttgttttagaactaaatttactacacaagatttttttacatataaaattatttctcttttagctttttacctcaaaaaaatacttctatatttttataacttcctttacatctttttttatttcttggttccttttaccttgttttatatataacctttaagtaagttttgaattagacaaaacttgttcaccttgttttttagcaagaatgttttttcctacaatatctatttattagaaaatacccagaaaatgaaatagctattatttaatttaatattactttatattctaaattatgtccagtttgtctataggtatttatcccattacatttacctaattttttaatattaattgtttacctagattatttatgaaaactgtgatagtcgtgatttaaagttatgagatcaccattgccaaattataactgaaacagtgaaaaaagatttgacctaactgactccattttgctcttaacttccaagctgtcgttgtttattcctgggcagaggtcaaactaactttgggaggaacttagtttatagttcacactttagcattgaaacaaggctatgaaacagtcctttcccaacacaaacctccttattgtctgtggactaaactgcctaaagccacaggattagaagttatagtaatcttactaaattcaagatgcagctatttgtattaaacctatatcaatgtcttatttattaaaaattacaaaagcaaagatcatcctgttttgggatgggtttatagttttgtaacccctacgccaaattttgacatcttatagtattgaataggaataattatgaaattgtttgattaataaatgtaaacacaaacatatgctgccaattcttaagacatttctcatattattttaccaataattttaaagctagcttatttattaaatattttacttgttacataaaattgaaaaagcatttgactagtcttttctttttcagtatctgatttaagcacttttatttttctttaagccaattatttagagctcttttatatatttttagcagtgaaacattctgtacacaacacatgaaagcatataaagacatattacgcgtgccaatgaaaacacattttatagatttataaataccccctcttttatttatttatttatttttttgctatcatagactttcagattcttgataacctgtttgacaatgctaagcacctgtcagctaagtagccttacatttgcacaataaaggaaacagctcaggtgaaaatcagagagaaaaagtctggtggtgctagagggagacgcttttacagagttccttttttttttgaaacaaagacatttctgagtgtctaaactacattcttccttaaaaacccaggagtagcttctgttgcaataactgttttagtcaaaaaatgaggtgaaaagttaagctgacttttaaccattgagctccttaaaacaatttttttttaaatcttattacagtatttcagctaggacaaaatgctgctaaacgaacaatgatcacacaaattatacgatttctgagcgctctaagggtaagcagaaattaacaccagctggttgttaatgctaactttaggcatttaaaaagaatttgcaagacagaatcccaaaccagtttcttacctattgatggttctcaggttgtacactgctctctaccatgctagagcaggaaaaagaaactcgtttttcctgttggaagtaagctctgcctccataaaggagttacctgccttccatcatcatggaagaaagaaaaccttaccttccttgttggaagcaagtaaaactccaaaaaaggaggagttgtacagcaaaataaactttagatctcgaccaaattttgggacatcagaacaagcactaataggagatttgtcaaagatcaggggcatctccattcagaatccctccgtggttaccaaaatgtgaacccagaaaatctgagacagatctcagttaattcagaaagtttgttttgccaaggttgaggacacatctgtgacacagcctcaggaagtcctgatgacatgttcccaaggttggggcgcagcttagttttatacattttagggagacatgagacatcaatcaatatatgtgtacattggtttttgtctggaaaggtgggacaacttgaagcaaaggcaggaagacttgaagcagggagaaagtcacagataggtgaggcacaaatggttgcattcttttgagtttctgattagtctttccaaaggagccaatcatatatgcatctatgtcagtaagcagaggggtgactttgaacataatgggaggcaggttggccctaagcagttcccggcttgactcttccctttagcttgtgatttgagggccccaagatttattttcctttcacacccatttacttgtacaaattaaaaaataacttaaatgtttgctgttttcaactagaaaagaggttatataatctcttcctctaaatttcaaactctgtcatggaactcacaggcagaaaggtcagcagatacaaggggccctgctcactcagcctcctgtgaatgggagacctacgtaggctctatgcactgctggtcatggtatgggtctgtggtccagcagacccttccctaccatagttctaccttcttgaaattcaagggcatgagtcaccttgtcattgggtgcccatcaatgacattcattaccaaagtgtccgcacttatctgtcatctgtttagagactgttggaaatatctggagaccttgaagagaagtgagattgagctgtagcccaatgttgatcatcacacatctgtgttaaatacaagtacactcttggtgtgtagcccttaaaattatatttatgcaaatatgtttctgtatgtttatggaactcatgcctttaaatattggaagctgaacataatttctaaaagccatgtatgtaaaaatgtaatatttcaacgtgtctacaaattaagacataattttactataaaaattgcaagttgagactgtcctattctcaaagtaatttgaaaatagtaactttggctgggccaagtttgggaggccaaggtgggtggatcatgaagtcaggagattgagaccatcctggccaacatggtgaaaccccgtttctactaaaaatacaaaaattagctgggcacggtggcatgtgcctgtagtcccccctacttgggaggctgaggcaggaggatcgcttgaacccaggaggcagaggttacaatgaaccgagattgcaacactgcactccagccaaggtacagagagagacttcgtctcaaaaaaaaaaaaaaaaaagtaactttaagaaaatataaaatgtatatataaccatgaatagtattgttaactattacagaaaaatattgtaccaagaattgcagctacatttaaagttaataatgttcttttatatttagaaccatttgctgggatttaatcatgaataaaactcacagaaataaaagttttgttacaaagtaataatgttctttgaaggtccaattatttcttacataggatccttccatgtcacatattatgactgagaaatatcactctagtcctcttatgaaaacttattttagataacagcctttgaaagaaaaacacagaaaagcaactgaaactagcttagtaacatggaatgttagaggtagagccagtggaatcaaagaatgggatgagcaggaaagagctaatcctcaaagtactggcttcaaggcagttgatgtccatctgtcatctatgctgtatgcatctgacttagttctttctggctgcatatttgcttcctaaataccttgggaatgtgagcaccaacaagtgcaatttagcactcgtgggtgccaagtgacttaatttaaaaccatttaattcttactatcacagaaggactcttgatattgttattcacagtgaaagtattccagtggagggaaaaatatctattggcttgttaaggttaaaactcaccaaagatcactgaatgaattgtggttggctctgtaagcaaatactaggaaagattaggttcattgtttactccaggggtaagtcaactatagctagagttgtgtagttagggaaggattagatcccattttcaccaagtatttggaaaaaaatgaaaggtggtcatgataagagaagggctctggtcaaaagggaatatgatagttctccataacggctagacaataatatggaagccaactcattttttttaacattgtaataaaaaaattcatattaattttaagcaaaaagaaaaaataaaccatatcagtttgtcttatctctgaactctcgagctatgccaggcaatacattccattacatgtaatgtgccttgtagcatttgaaaatgtactccacgttacacaccatgttttttcagcattgcatttacacctcaacattctgcttcttttcctcctcggtgaactctggcttgatattacatccattaaaatcgatgccaaggatcgagcaaaatcctctagctatggaaaataaacacgaattagattggaagaatggatcaatcacttctgtactaactgtatttatgttttcatactttgaattttcacttatctttgtggccacatcagttttcatttttaaattttaggtaagttattttatataccatttgtttatatactaaattattttctttatttttattacataaaatattatcaagccagatctagagttaattggatatatttttaacagaaaaattttgtaccaatgtaattgttttaatctattactctcatcttttgagtttttatatgttcatttactttcaattttattcttttaccatttagtcttttcctataattttattttcaagttttatgagtaagacttgtaaatttaaatttcaaaacttggctgagatcaatactttaagtttatcaccttctacataatatgtaagtgttataagctttatttcaatgaaccaaatccatgtttaacccaattttatttattttagcatattaaacattttgaagtattgtactgcatgttctcacttataagtgggagctaaatgataagagcacatggacacataggcagaacaacacacactggggcctactggagaagtggggaggaagaggatcaggaaaaataactaatggataccaggcttaataactgggtgacaaaataatctgtataacaaacccccacgacaaacatttccctatgtaacaaacttgcacatgtacccctgaactcaaaatgaacatctaaaaagatatatatttacatacacacacacacatatataatttcatgaatgttatcagtttatagcagtatatggtaaatctacgtatatattttaatctatgctggattctagtgaccacttctttttctaagtatttaaattatatataagatataccaatatcatatatttcatcatataagtttcatcacattgagctataattcaaagaatttgctgtgttctattacctgtgaataaatttcctgtttatattttggctagctacgcactactcctcaattactaatacaattggctcttgcacaatgcggaagttagggaaactgacctctgcacagttgaaaatccacatataacatttgacttccccaactgaactaatgaactactaatagcctattattgacccaaagtcttgcatatatacagttgattaatacataatttgcatatgtattatatatggtagtcttacaatagagtaagacagaacaaaataaaatattgagaaaatattaagagattcctaagaaagataaaatatatttactgtttattaagtggaagtgggtcatcataaaggtcttcattgtcattgtgtttgtgttgagtagactgaggaagaggaggaagaagagggattggtcttgtctcagaggtggcaggggcagaagaaaatccgtgtgtaagtgaacccacacctttcaaactcgtgttgttgaagggtcaactgtataatacaaagaggcattctgcaatcacatgtgtaagctatttaaaatactggaagtgaaaaaaaaaagaaaaaagaaacaaaggccaggcgtggtggctcccgcctgtaatcccagcactttgggaggccgaggcgggtggatcatgaggtcaggagatcgagaccatcctggctaacatggtgaaaccccgtctctactaaaaatacaaaaaattagctgggtgtggtggcgggcactgtagtcttagctgctggggaggctaaggcaggagaatggggtgaaccagggaggcagagcttgcagtgagccgaaatcacaccaccgcactccagcctgggcgacagagcgagactccgtctcaaaaaaaaaaaaaaaaaaaaaaaaatactggaaatgaagtaatttttttttgagcgaacaaagtttatatcaagaaaaggggtaaatatttaaaaactgagtttctcaagtagtgtctccctttcattctccttgcagataaactttcaaaccatagaatatttctccacgacctgaagaatcaggatcaagctctcaaaattcctcagtgagtctttctgacaggtcgtagggatgacctcttgaacatggccaagatgttttggttgctcatcctatcatgatgtcctgtccatctttcagaaatggaacccatattgatggattcaatgtaggcaaaattccactatctaccagatagctgtgcgttcttcatttttcagggagaaacagggttgtagattagaatatggtacagcaaatattcacctcctctcccactcccagtttcctggaaagaatatgcttcctgtctctttgatgctgagcttagttctgtgacttgttttggcctcatagtaagtagagcatgctgtcctgtctcttgacctgggcttggcgaaacatttaagttgctttggccaatggggtgttagcagacatgatgcaagacttgaaacaaggttgcattagtttcactatagcaagaacaagccttgagtaagctcttgtttaaggaggaggacacaggcagagagtacatgctagatctggcttgtagccaaggcaactgagtcctaaacgacccacagatatgggacaaataaatggaaaaaaaaaaaaagtttgcttttcttcatttgttttttaatcattgcttctccagacaagatttttgttcagcctttgctaagtacattcctcctgactataacaaggttattatctttttttaatatatgctttaagttctggggtacatgtgcacaacacgaaggtttgttacataggtatacatgtgccatgttgtgaaataaattttaatttggaaacatgacttaaaatagtgaaatcatctgttctaaattactgctttaatgtgtcttgaattatgagttataatgtttattttattcagctttcaggtacttttcatttgtagagtaaatggcattaattaacagtagttgagagtttagtagcatatctctcggttttctaaaattatgctaccatttattacttacaaaaaataattcatatgtatccagtaatgcctattttaaactttatttattatataatattatatattatatattttatatattatatatttttatatataaaatgtatatttatatattgtatattttatatataatatataatattatatataatataatattatatatttatttatttaataaattattatatattattaattatatatttaataattatataattattaaatataaatataaattatttaattatatttaataattatataattattaaattaaatataaatataattaaattattatatatttaatataatatatatttattatataatattatatattatatttaaacttaatttattataaaattacaaattttaaagtggctcattagccactttcttttgatgtgagaaacttcaaagtttctgaacatttaaaagatttaaggcatcctcaattttacctttagctagatggtcagatttctctgaagaatcatgtctcatattttcattactgtcactgatcactgatcctaatgtggtcctatatgaaattatcaacatatgcttattagatgatagaaaagccaaagaaaaacatggatcagcaaaatataattgctacaaagacacacattcaggcatacagaaagatgatcaaaaaggtctaaagaagtaatcatattattttaagaaaaagtattatcagcatctatacagaaaaagttcagtaatttcctggctgttcacgaaatgtaatgaaacctgtagaacactgaaagggagacataatagtatgaatttactttcctctatgtagtgtttcttctttcttttcttccaagtcttttttcaaaccttttcaagttcttttaaaccctagtgatgtacagacagtactgaagtgcatttttacttgccaaattgattcagcttctaagcaatctttagaattcaaataaaattcactattctgctgactctagctaaatgcttttctcataaatgcattttaaatcatgtaaaagaaagaatctgcaatttatacagttgctaaaaattcatgattagtgatcatttatgatctcattttagattacttatcttattaagaagagttttttgctgtcatattttaaaaatcccaggttggtatttaaacttttttgaggacaagtgagtactgtttgagtaaaattcactaattgagggaaaaatgtgtctctatcatgatgctatagatgttataaaaagcaattgtcacccacatgttcagtgcattaagaacttataaccaggtgtgaactagtatcccagctcctcaagagggtgaggcaggaagatcacttgagcccaaggagttcaaggctgcagcatgctatgattttacctgtgaatagccactgcacaccaacctacatgacatagagattttgtttctaaataaataaatacacgtacacatacacacaatatatacatctatatatatgtatatgaagagagactagactcagtatagcacagcttttcagtatgacaaatgtgtgtctaaatcttctctctctctcatctattagctctatgatatagctgtcaacttactcaattgtaaattgaaactgcatcttgctcactagattatgagaattaaatgagatgcaccttaaagcttggtatttaaaatgctttaaactaatgtcactttattttatattttctagatacatacggacaaactcttctctctgtgactcataaacaagtaaaaattcatttttctttctcattagtttgctaggattgacataacagagtagcacaaattgggtggattaaatcaatagaaacatattctttaacagttccagaggcgagatgtctgaaagggagatattggtaggtcaatgcatcctctaaagctcacaggggacattctgtttaatgcatttctcttaacttttggggctggtagaactcctggaagttctttggcttgcagctacatgaatctcatctttgcctggatcttcacatggtggttttccctctgtgcccgtgtctctgtgttttcacattgccgtctcctctttacaaagggcaccagttatattggagtagggcccacacaaatgatgtaatcttaactcgattatgtctgcataactcgattacatcagataaagtcacatccacggataataaggattaggatttcaacctattttattttcagggatggtggggacacaattcaacccacagcactttttattttaaggcgcatattccaatttcagccaacactgcaatatttctctcctcaactcatacactctctgcccttggacataaaaatcagataagcctccagacaattatagaaatactacatttaccattgtattatcatgtagaatgtttttctgctttattcatttttatagcacacaatgtaatttttacaggtaacaagttattaaaaacatgattctaacatgtcatttattaaacaaaatatacaaaacacattatattaaatattataaaaactaaaactctggcccttttcctcaatttttgttggaaaaaataagacatcctccctgctttgacatattgtgtcctttgaagcaacagtgaagtgaaccattaaaaactaaaacactccattgaactgaaaaacaaactctgattgggaaagctaatgccttaggaaaaagcaggttttataatttctgatttcatgtcttcttgtgtctttgatggatgatgagaaaagctaaattctaaatgaaaatgccacagtgactgcaatactattacttcttgttttgcataccaacagaagttttaaaaatgtccaaaaatgcacaccaaatagaaggtgacaggacagcaagaaatacaaccacattggatgtgccatttcatagttcatttcctaatggtaaatgagacttacatatttcacaggccttcaatttacttgaaaaaacagaaacaaatatgctcttgaattgctcatgagtttttttccatgttttcaaatataaaactaattcataataattcataattaatacgcttctcaattttggctatttatgtcatgttaacagcagaaattgatatgagtttcacaaataaatgactacctgaggcaggtagtttattgccaaagtaaaagagtccttttaccacattggctggggacaatagagtcatagccattcttcattcgaaaggaagatattgtcttagaatatatattcatgacccaaaacatgtaccttattcatgaaatcaataaaagaataaaagcaaggtaatagggaattctaagtgcccaagaagatagcagaatatgtgaacattaagtagggtaaatagggcagacttaacagtgaagataaaatttgagcaaaggtatgaagaaggttaggcagttggcccaattgacattcaaggcaagaacttcccaggcgaaggaactagctagagtaaatatcctacagcaggagttcctggtgcatatgcaggagaacaaacaagctaaaaatgaaaagacaaggggagagaagtagaaaaaagtatcagaaggataacagggcaccagagtttgtagagtttcattaattcatagctatcaccttggaaagccacagcggtgtgctggggagtgggtgtagtaacatgcccggtcttttgcttaaaaagtataattttagttacctagataagaatagattgcaggggcaatggaaaaagcacagaaacctgttggatggtattgaaatgatcctacaaagtaatgatgcttgattgcactactgaagtagatggtgagaagcagtaggattctggttatatcttgaaaataggcttggcatgattttctgattgattagatgtagagtgagaaagaaaattgtgtgtttatgtgtgcatgtgtatgagtacctgtgtatgtttgtcagtgagaaagacagacacagacagaaagtcaaggatacttctaattctagaatttgagcttcagcactggaaactatcatcaactacaaggggaaattgtgagcagatcaaatgtgagcgcatgtgtgtgattttggagtgaggctctcaagagctcagctttggatctcttaagttggagaaatgtatttgttattcattttacggaagttagtgatgtcagaattttgtaccttgtgcttatactctgtccctatatcctgaccatggaagaatcaaatgaaaagacatatggaagtgcaagatggtagattagaagatagaatcacatcctactgcaggttgtgagccaagccattagcccaacctaagtttgagcagagaaatacattttaaattggataagagatgagagatttaaattgaaccagattagattttgtaatatctgaatgtaactggagcttttgcttcagatataattaactgtagagataaggattacagaatatgcatgaaataaatattaaaataaaacacaatattttccagtttataccccactcagatcaaatcacttaaatgtgtttctgatacatttattatagtcaaatatatatgcaacaggcaataaatctataggaacatgagcctatcaagtatgtatttgccatctagagtgatagaaagatgaatatttaataattggccacgtgtaaatcaagacaaaattgagatacattaaagtatgtttaagaagaggtgttggccatgcacgttggctcacgcctgtaatcccaacactttgggaggctgaggtgggtggatcacaaggtcaggagttcaagaccagcctgaccaacattgggaaaagaaacccctccaccacaaaaaaaaaaaaaaaaattagctaggtgtggtggtgtgcacctgtaatcccagttattcaggagactgaggcaagagaattgcttgaacccaggaggtggaggttgcagtgagctgagaacgtgccactgtactccagcctgggtgacagagtaagactccatctcaaaaaaaacaaaacaaaacaaaacaaaaaaacaggtgcagttaattatgattagaacattagcagaatgaaattaaatattaaaaataagactgaaagtatgggttataggaatattttatcaggtgagatgataaaatgagtttctgaatgcaataaggaataaggatgctattttccagttattgagaatctattatttttaacgtaggaagatacttgttattccattaacaggagatttttaaatgcattttttaatgttttcacaactatgagaaatttaacctgtttttagtaatagatgagatttacagagaaacatctcctagtaaagtttacataaaaatacaggattcaatggtaaaagagaacatattttaagcttgggtaaggcttatgataaaataaaagtgctgatcagatattagacaaataggaagcaaagtggaaaaaaaaccccataattcctggggatttgggaggacaccgatcagggcaagttagaaggcagaatcagggaattttgcatgaagaaaaaaaagtacctctgcaggaaaatatcaatggacaactagaaaaatgacagacaaaaacacaaaagcaaacaaacaacaaaatcatcaacagaaatgacttgttttcattgaatagaaaaaagcaaacaaaaagacactccttataaataaaccctattttaaattccaattcttgacttggagtaacattcagatggaagcttgcattcacagacctgtgtggtgtcaaaaaatttaattattttgatatgaagatctggcattgattatgaccccagatcctggaagagtcatgtgcaaatacacattcaaaaaattaattggccgggcgcggtggctcacgcctgtaatccgagcactttgggaggtggaggcgggtggatcatcaggtcatgagttcgagacgagcctgaccaacatggtgaaaccccatctctactaaaaatacaaaaaaaatttagccaggcatggtggcatgtgcctgtaatcctagctactcaggaggccaaggcatgagaatcacttgaacccgggaggcagaggttggagtgagccaagattgtgccactgtactccagcctgggcaacagagcaagacttcatcaaaaaaaaagaaaaaaagaaaaaattaattataaaattcccctcaaataaaaatttttcataggtaaacatctaaaaaatatgaactcacacatacatatcactaaaaatagaaaacaagcccacatggctgaaataaaaacacatagatttgatagagaattttaataaaaaagaaggtatttaaatataaaggcgaaaaagaggtgaatgaaaagaccagaaagatctgaaacaaacaaaaataacttctagaattgactagatacacacacacacacacacacacacacacacaaaatagaatgtagttccgtttctggttttgatatataaaaagataaaaaaaaaacttccactattgttaaaatacaaagaaacaaaagaaataaaataagccaaaatattacattaatatattatttaaagccatcaagttgctatggacacaaattgatgaaataactaatctccaagattcaagctatgaagtttctaaataaacaagttatggaggatatttcactacctcctgatagttgctgaggtcaggcaaggcaggcagggaaataaacctaccggagaaggaaggtctttattcaactgaaaagaagccagtaaaacttaaggcaaaaccatgtgctacagcattctagttgtcttaaaggaaacattttgaaaaataaaataattttctacaagtaatgttttacagagaaataccattgagaaagcagatgaaggtggggtagaaatagagggcatcattagaactcacaatctcatagtcttgaagtgatgggctcttacagtcctgtggcttaatcatttctcagtttgataatttcaagctcacaatctgccaaagaaaagtttcatcatctcatgcttcaggttgtctcaaagtgacagtcatgaaattaaagaactcaaaatactgctatcctgagttttagtaatctcttgatttaacagtctcatgctttcagagagtgaagcaataacaccataaaatatttatgggtttaaagtctagtcagttcaagtgactggtcctagatgctcctagaagagtatctgatcacatcttcaaaattgtaggagtctgaggggaagtgaggctaaatatagatgcaaacacatttccatacaatttaaccactgataaaattaaaactatgagctcaatgacagtagtaaaagttgggacctcatttgaaaagcaaacaaacatctccctatattcctgatgtttgaaccccaagtccttaattaagatgattaagcagaacccagctgccatgtattggtcctcttcatgagttctccctggcttcccatcagaggaaaaggcatactcctcattcctggaactgagtgaagtggtgacatatacttgcttcaatttcagaattgctatggacccaatactgcgatatgcctcccatttctctctttcccttttcaaatgatagtgtctacttttattattctgtcctttgctcacagttgtatgttggatctattgtgtgagagggcagggacttagggttacatatcctggttattttacagctgtttgtatctgaaattgcccacctgagagccaccccaagagtctccgcctcatgtagatttaattttgataatgagctcttagatttcaacccagagttgatgttacaataagatgaaattttgggatattgtgaaagtatgagtttgtatgtcagggcacactctgtactgtagaggtaaattattgggaaattaaagttgccataaaatatttgccacttctaccataaggaaattcatttccctctcctgtgaattttggctgaccttgttatgagtttgcctggaagaatggaacagaaacaataatctgcccattttggacctagattttaagagtcctggatgctcctttaaaaaaaaaaaatcaaagatggtgtattagtccattcacactgctaataaagacatacctgagactgggtaatttatcaaggaaaggggtttaattgactgacagttcaccatggctggggaggcctcaggaaacttacaatcatggcagaaagggaagcaaacacatccttcttcacacggcagcagcaaagacagcaaaaggggaaagcccgttataacaccatcagatcttgtgagaactcattaactatcattagaaaagtctggggtaaactgaccccatgatccaattatctccacctggtcccactcttgactgatgggaattcttacaattcaagatgaaatttgggtggggaggcagagccaaaccatatcagatgggatttctctgagaagagtattctgatggagagacgataaatagatacacagagagacagagagagagagagagagagaatatgagaatatgaatgaatatagtttgacttggaagccttctagttacctgaggcagcagctatgctaatatggtaacttggatttccagtcccagtaagcacatggcgattgaagccaagaacaacaatatatctccatacctgaactcagctcataatacagaattataagtaaataaatggtagttgttttaaaccactaggtgtaaggttggtttgacacacctggagataatttaaattctatctttccaaagccttggaaaggctttaggccccctgctttctgggagaccttgtccacctccatcttgtacctctaaagtttctatgttatgtttttaggtttcaacattttgattttctaaagccatgaatttatttcataaattttcccttcattattttaacaaccgatccaatagttactcacactaacaaggcatggtaatttttgtgttgctagctgataaagatggatgttaattgttctagaatcttattcagtaaatcagatccgaaggcaggtagtattgctccaggatgaatcccagtggcaattatcgatgcttgagtgcttgtcaaagcctttatttattcttaaattcaattcaaatagtcagctgctctttcttgtttgtcgttgttttgattgctttgctattttgtttctttaggtttacatatattaaccttagatccacaagcgagagactacatacagcatctttcaagaggctaaggtaagagtaatgctgttattaggattgtgactacaatattagtcgttctcttggtcattttcctgactttggggtatatatgtatgcttaagtcaatagtgtctgcagaatatctttatttgtctagcaatttttagtttaactttgaattttagggatctttaaaattatacctttgtgctattttgagtttcatggaaaattattagaaaggtgtgctattcctcctagccagagtttccctaacagagccaatacagatggaatcctgttgacggcattaaaggcaagactatttaacgaagagagctaaactaacatagaaaagtgccaggaatcttttaactgagcataagagaaaatactccggagttataatgcttgagttgctgagcaatgagacttgctgaataaggccagtggaaacttatcaaacacatcactattataatgcagaaagtctattcaaatgagcatacacatatacacaatatatccatgtgtgaatgtatatccatatatacacatatactgatatatattcatgtgtgtatgtgtatatatggattacattcttatataacatacatcccagatgaaatgtatatgcatatatacacatatattgatatatattcgtgtgtggatgtgtatatacacatccacacacgaatatatatgaatatgtgtgtgtgtgtaaatcaaggaacaaacaaacacagcgatggtctgtttaggaattctaaagagtcaagaataatttagcttgagtgagatagatatagagacagatataaatacagatattttaatagatatcaacacctacacatacatatgtctatatacacatacatatataagtatagatacatgtgctgtagtagttcatattctgttgattataacagataccagagggccgggcgaggtggttcacgcatgtaatcccagcactttgggaagctgaggcgggtggattatgaagtcaggagtttgagaccatcctgaacaacatggtgaaaccctggctctactagaaatacaaaaattagccgggtatggtggcgggcgcctgtagtcccagctactcgggaggctgaggcaggagaatggcgtgaacccaggaggtggagcttgcagtgagccgaggtcgcaccactgcactccagcctgggtaacaagcgcgcaactctgtctcaaaaaaataaaataaaataaagcaggtaccagaaactgagtaatttgtaaataaaagaaatttatttcttacagttatggaggctgagaaatgcgaagttgaggagctgtgtctggtgagaggcttctttcgggtggggactttctgaagagacccaagacagcacagggcatcacatggcgaaggggctgagcatgccgacacgccagctcaggtttctctttctcttctgataaagccaccagttcccctcccatgataacccattaatccattgactcagtaatccatacatagatttatccattcatgggggcagaaacttcatgatccaatcacctcttaaaggacctacctctcaacactttcacatcgtgggttaaatttcagcatgaattttaaaggggactaatattcaaaccatagcaaatatatagtacttcttgataaaattcttgatattaattctcttggagatacaaggggaggaggtaagggtttgggggaagaaaattctggcagcctgatgcttaattgattgaatggtgtggggaaggaaagcacataagatctgcacataaatttaaatgacaacgctaaagggtaccagaagttggacttgctgttttattcttctgggactctttaggattgacattgtaatttatgtgaaagtttcatgccatcaacccaaaccaatcaattgggtatctcactgattgtgctataacttattacttctttgcttgagcttactgataaaatccatgtgtacttcaaaattaaaagccactataatggaaactgttagaactctttatacacatgttatatgtctttttcagtctctcaagaaatttgtatatttggagagaatcatagaaatatatcatatttgctagtatccatttacatgaaggagataaattttcacagcatttatatcaaatacctcaattaaaaatggtttcatctgggatgtatgttatataaaaatataatccacagtaaaataaatgatgtagaataaataatttttatgatttcatatataaacaagagatcgcacaatggctttcttttgggggcatacagtttcttcactattggtggctgctgctcatgcctaatgatttctccagctgctctgagcatttgactataaataaatacttttctctgttccaaatttatgccagtctgtgccatgaatatgttagcagggcttcctcctgggttgtaacacactaagtaccagcaatgcaattagcttgactcagatacaggaaccagtttacatatgactccttcccttgtaaaactcatgctttgcacaagataacaaggaatgtgtgatttgctagaatatgactcttggtttctaacatcagcacacacagctaattcctccctttagatatttttcataatttaaaaatatctatatagtacagaggaattaagatagtttcagtgaagtacaactcaagtttggacagggagaggaaaagatatgttgacagtgggcaggctgattgtgaatttgcatattacctttcagtatgttggtcattactcaaggtccaaaaggaaaatatactgtgagaatcagcctgattaacaactcaacttctacagagcattaaatctgtctatgattttattcccaaaagaatgaatttcctttgaggaaagctggcatggctggcccatgggactctatcagaagacttaggagactctattgcagcccacaaataattttacaagttccccggggaggcatgataactcaactgtcatatgcaacacactcaaactgagtttttcttgactcacaagaatccctaaacagattaagcctgtttttgtttttttcttttctttttactgcttaattcatgcaaggaaaagtactcattcactctatctaagagattaatctctttcttccaattttctgattatttttgacccttttaactttttttttattcactgtgcccttagcttttacactgtagtgggaaaagtcaatcaaataaaatcatgctggcagacacaagtagcgccatatcaaaaatcatgcttaaagaaaataacatttcttatgttagtgctgatgaaatttatagttagcagtccatgcacaatttgtttgctgagaaatatgtggcaacacaccaacatatcaaattgtaaaaaattctgatttgtttttcaccttcactttattatcagcaggaaaaagtaatggagattaaagagtatataacaaaattgaggtggggatatacaagttacacacagagaaatactctagtttatgtatatatatatacatatacacacacacacactagttatgtgtatatatatacatatacacatatatatatatatatatatggagtttttctcttgttgcccaggctggcatgcaatggcacaatatcagctcactgcaacctctgactcctgcgtccaagcgattctcctgcctcagcctcctgagtagctgagattactggcatacgccaccatgcccagctaactttttgtatttagtagagacagggttacgtcatgttggtcaggctggtcttgaactcctaacctcaggcaatccacccgcctcagcctcccaaagtgctgggattacaggcttgagccaccgcacccagccatatatttttttaaagagagggtctctctgtgtcacataggctggaatgcagtggtgcagtcatggctcactgtagtctcgacttcccaagctcaagtgatcctaccacctcagtctcccaagtatctgggactataggcatgtgccaccacacccagctatttttattttatttttatagagacaaagtctcaccatactgccttggctgttcttgaattcctaggctccagtcattttcccgcctcagcctcccaaagtgctggaattataggtgtgatccactgcatcaggctcagttatgtaattttaaaagggaatgagaaactttagaaacttagatgtatgtgatagagaataaacatgtataaagtaacatgctttctggcaataattgtgtgttattgtttgtgttattctttaaaatgtatcttataaatgttcacagtttataggtcaaatgtttgcattgcaaataagtaaacactggcttcatactttttaaaatattatagcagagtcagatttaaattttcctcagacctttgtttcagaataatttggtagctaataaagtatgtgcatgtttattatttgattgtttataattcatttccttttatgtcaatatgtcacaaataatcctcatctttccatttttaaataggcacataattgcttagaatttgaatacctacatcacctttagcccaaacagtattggaaaagctgctttaagttaatcatcacagatcacagtggccaccatcaaaactttggaaggaaagataaataatgacaagtgaaaatatgattaaatcttttctggaatttgaaggaataaaaatagttcaaactattatgggttgcatataaatatatttaatattaataattggctattaatttaattatagcttctagtaaaattagaagtgttacaaacacctttcaaaccaatgaaaaagctagtcctttgacaagatacaaagcatgtaaaaaagattaaaatatgaaaaaaatgaaagtatagtccagtgaatcatataggtgagaggaattaatttacctttataaatataaaaataaaatatattcaaccgtttctcctaataaaataagtatacgttcaatatgagatgggaagtggaaaacccagttgcaagcaggacctgttttgcacagaaccatattaactggagcttgagcatattgacaatgtatcctccaaatatgaccaacgtttaattcacatagtattgcattgaataaagactacctgtgttcaccagataaacagaattaaaaacaaaaaacacctgatcttctcaatagatgcagaaaaggcttttgataaaattgaacatctctttatgttaaaaaccctcaacaaatgaggtattgaaagaacatatctcaaaataataaaagccgtctatgacaaacccacagccaacatcatattgaatgagccaacgctgaaagtattctcctgttctccttgagaactggaacaagacaagggtgctaactctcatcattgctattcagtataatactagtaagtcctagccagagcaatcaagcaagagaaaaaaaaaaaggaatccaaatagcaggagagtaaatcatactatctgtcttcacaagtgatgtaattctgtaccaagaaaaccccacagactctagcaaaaggctcctagaactgataaatgacgtcagtaaagtttcagaatacaaaatcaatgtaaaaaatcagtaggatttctattcacaaataacatccaagcagagagccaaatcaagaaagtactcccatttacaaatgggaaaagaataaaatatctagaaatgcagctaatccaggaggtgaaatatctctaccataagaattacaaaacactgctgaaagaaatcatagataacacaaacaaatggaaaagcatcccaagctcatggatagaaggagtcaatattgttaaaatggcataagacgcagaatttaaagattcaatgttatttctaacaaactaacaatgtcattgttcacagaattagaaaagaaaactattctgaaatttatatagaatcaaaaaagatcctgaatagccgaagctacctaacttcaaactatagtatcaggctacagtaagtaaaacagcatgtactggtacaacaacagatatatagaccaatggaacaggtgagagaactacgactatctgatcttcaacaaagttgataataacaagcaatgggaaatgactccctattcaataaattgtgctgggataactggctagccatgtgccaaatatagaaaaggacttcttcctttcaccatatacaaaaatcaacccaagattgatacaatactttaatgtaaaataaaaaactgtaaaactctagaagaaaatgtagaaacaccatctggacatcagcctgggcagagaatttatgactaagtcctcaaaagtaatttcaacaaaaataaacattgacaagtactacctaattaaagagcttttgcacagcaaaataaactatcaacacaataaacagacaacttatagaatgaaagaaaatatttgccaactttgcatctgacagaagtctaatatccagaacttacaaggaacttaaacaatttgacaagcaaaaaagaaatgaccccattgaaaaatgggcaaaagacatgaacacacacttctctaaagaagatgtacatgagaccagcaaatacatgaaaaaattctcaacatcacttctcattagagaaatgcaaattaaaaccacaatgagatagcaactcaaaccagtcacaatggctattacttaaaacgtttaaaaataccagatgttggcaagcttgcagagaaaaggggggcacatttacacactgctggtgggaatgcaaattatttcagccattgtggaaaacattatggggatttctcataggacttaatacaaagctgttgttcaacccagaaatcccactactgggtatatacccaaatgaaaataaatcattctcccaaaaagatacatgcagttttatgtttatcacagcactattcacaacagccaagacatggaatcaacctagatgcccgccagtggtggactggataaagaaaatgtgttacatatacaccatggaatataatgcagccataagaaaccgtaagattgtgtcctttgcagcaacatggatgaagctggaggccattatcctaggttaattaatgtagaaacagaaaaccaaatactgcatgttcttactttaagatggagctaaactttaagtatacatggacacaaagatggaaaaaatagacactggatactaattgaggtggaaaagtgtgagggggttaggtttcaaaaaccccctatggggtactatgctcactacctgagtgaagggatcatttgttcaccaaatgtcagtgacacacaatttatccttgtaacaaacctgcccttctagcctctgaacctaaaataaaagtcaagaaaaaaaaaaaagactatctgcgtccacctttttttttttatcagcctctgggtaaaaagtacacatgaattttaaaactaaatatttaaaaatatacgcctggaaaatatttacaaataaagagaggtaacaatattaagaccatccaaaataatattaaccaaatggtaaaagtggactgtttatacccatcagaatttagccataagcactttggtaaaaacacagctaagtaaacaaaccctgagagaaacaagaaagaatcaagagaaacactgccatttggtctttgtcaaacaatttaaataaaataaattgtacatgaatgaatcatgttataagtaaggttgatttaagtgctatcagtaaacatatcccataaagacaacatacattctttcattcagtcaataagaatcgaaagtcatttgtcacacaaaatactcttggtaatctgtaaaatcaagaaaatcaaaccatactggaaatgaatgatcagactccagtactcctaaatattctttcctatttttgagatttgaggaacattagatattttctacactttttaggttttaaatttttgtcatgttctattttctgttcttttagttggaaaatgaaccgattcctgttacctcatctcacctccttgtttctttcactttagctcaaagtagtcagtaatgatcactccatatttctaataatctgttttccaaccgcattcccaagtgtagaaactccataaaccccaaattcaatataaaatatgatagttttataaaatgtttttacattgcataacatggatctattaagatgatttctatattcctgttttgataggaggaaacacaagacctctgattagagaacaggccacttattacttacagagcattatgtgtccatttatcaggtacatttcttcacaggatgatgtggtgtgagccacatgttcacctgtgtttgcagtagttgcacagcaggagaggacctccaaaattatgaaaagcagtgctgatgtagaataagtagcacaactttccatccccctcgctggaaaaaaaaaaaaaaaggtactccgtaagataataaccaagtcactgtcatcctcagtgccaggattccaaggttgtaaggagaatcaaaacacagcagggtgatggagaaatagaaataaattttctgtggctgagtttatgaaccaggcataaaaagagtacacaagatatctatctatctatctatctatctatctatctatctatctatctatctagatagatagatatacatacagtgaagagaaataagtcacattgtcatagtcaactaaaggacaaccttaaaaatgtggtcttgctgtgttttcacagggaaaagggaagggtttgtctaacattcatccagtctctgctcccacatttaccatattctatgtctattctcaatatcagttttggaatgaaatacaaaatcaaccttgttagctggtgatttctcagtatttcctccacctacatttgctttttcaactttcaattgagctagtttcatcaaatcgtaaagctttttacagatgaggattttttttacatttttaaacaatattaaatattctaatggcatttttcaatttcttaaattgatttcctattttttctcaaaaattaggatactttataaaatctttatgtttgtctataagattagaattatcttatataggaatacattatcctttctttttctcaataaccttgtaaattaacattgatataaaatgttcaaatgcaaaaaagaagtactttgaaatttaggtacatattataaatatatttttaataactcagagaaacgtccacaaatgcaaagatgaaaatcattttcagctattggagaacctatgctgaatacagttcaacaaatatttatcatttacgattttatagtagggaaaaatagcattatgaagatgattgatccttagaatgaatgaataaatgagtgactgaatgaatgaaaggcagtctggtggctcaacaggatgcttatctaagttgagggcatgcatagaccctgggctaaggtggaggatccagaaaggctgttccaagcaggaaagttgtccacactaaatgtgcaatttggatagacacagttaactccacaagtctggcacctgctttccctttcttcttctttttttttttttttttttttttttgacggagtctcagtttgcagtctgctgttgcctaggctggagtgcaatggcacgatctcggctcgctgcaacctctgcctcccgggttcaacctattctccctgcctcagcctcccaagtagctgggattacaggcacccaccaccatacccaactaatttttgtatttttagtagagacagggtttctccatttggccaggctggtcttgaactcctgaccccaggtgatccacccatcttggcttcccaaagtgctgggattacaggcgtgagccaccgtgcccggcctccctctcttctttctaagggtccaaaaaatgtagtggaaaatatgttaaaagctgctaaatatttttctgaataaccaaacagtactttcgttctttagcagaaatatactaaggttacttgaattgttagagagtcaggtacataacacccaaacacaatgtaacattctggataagattcaggaaaaggcaaaggacattggattaaaacaaagaaaatctgaataaactacagacattagttaataatagtgcatgaatattggttcattaattgtaataaacatgttatactaatgtaagatattaataataggagaaactaaaagtgaggtgtatggagggtttctatgctatctttttaatttatcagtagatttaaaactgtttttaaaaattaaaactgttctaagacataaagcttttctaaaattatgcaatttgtgtaattatgaactattacacatacttggctgaaatgttcccatgaatcaaactgctgacctaatgtagcagagcaaaattttgaaatactgtataaccacaaccaaatataaaaatgcttacaacaataatcacagaaatcatcattatcattattaaggtcataatagaagaaagtaaaactagtgctgggtgacacctgagaattcaagtgagagtaaaaaaaaaaagtttgttaatactgaatggactgtgctaacttctatagtttcttacaaaaaggcaaaacaaaacaaaacaaaacaaacccacaaatataaccctgctgcttaaacttacaattatttgctatgtcaaatagaatcctatgtattgaagacaaagagattgaacatatttcaatcaatgggaaaatctgtcaacactttttctcagcttcaagaataacaaccggtttataggagaaaaacacatcttatatgtggatacacaatcctgaggaagaaatcctgtcaataacgtctcctaacacctctcctactgcctaatttaattcaaataaataggacgatacaaatttatatagcagatagggcataagtgtgagatgtcagagtaggagtatagtataaatatggatcttttaaaattgaaaatgttctttgaaaggaaattataaaatttaccacggaatgcctagtttctaccagggattttaaaatatttattacaacaaaaaattggagttatggtgctcattttggaaactattcaggtttacaacttgactcactggcatcaagctttgtaaatgtcttatccatgccccattagcatatcctagggttcacctgcggttatgtaatgagctcccatttatgccaagagcttcctgttacaactacctcgtccttcttcctgaaagcatctctggttctgagaagtacagaagtttaatagaatttcagaagtcatcttcaaaaatgaaagcggctgtaattccttctttttatatctgattttatttctttgaaccttctatcttttattcttaggctacaggtttgttgattttgtttatcttttccaaaaaattaattcttcttagattttgtattgcttattttttctctacgttgtttatttctgctctgatctttatcatttcttttcttctattaattttggttttagtttgctcttgtttttctaattcctttagatgtgatatttggttgtttatttgagatttttctctttaattgatgtaggcatttgttgatatgaaattccctctcagaatggcccttgctgtaccctataggttttggtatgttgtgtttctattccaatttgtctcaataaatttttaaatttcatttttaattatttcattgacacattggtccaagagcttgtagtttaatttctatgtatttcaaaattttacaaaatagtgtttttgttttctagttttatatcattgtggtcagaaaatacacttgacatgacttcaaccttcttaaatttattaagacttgctttgtgacctgtaatttgacttttccttaagaaattgttccatgtgcacttcagagaaacgtgtattctgctgctattggatgaaatgttctgtaaatgtttgttaagtccatttaatctagagtgcagtatgcattcaatgtttctttgtagattttctctctggataaattacaactgtcattttgttgttttcttgtggttttgtggattctttcttctttttctttctttcttcttcccttactctcttcctttggaattaagtggctttcttcagtggtttgttttgatttattgccttttgttttcagtgtatctattacaagtttttgctttgtggttaccgccatcttaaaaaaaatcttataacatgtaattttaagtggataatagcttaattttgattgcaaaaaataaaagccattagattttaaccccagtccagacccctcccaaacttttgaatttatggtgtcacaatttacatttttttgctgcctatcccttcaaaagttactgtcattatattatacttaatagttttgtctttgaaactttgcactaaatatataagtgattaacacatcattacagttttaaattaatctgaatttgacctacttttaccagccagtattatactttcaaatgtttttgtgttactcactagcattcttttctttcaatttaaataactttctaggcacttttttttgtaagacatgtttggtcatgatgaattctcccagctgtttttgggaaaactgttctcacttcttcatgtgtgaaggacagatttgctgaataaagtgttcttagttggtggtgttttagtttcagcactttgaaatatattatttcactttctcctggcctgtaagctttctcctgagaaatctgtgatagacatattggcatttccttctatgtggtgtatcttatatcttgctgcttttcagattttttctttgtctttgattgttggtagtttgactattagatacattaatatactccacttagtgctgaatttgattggaaactctttgcttcttacaactgagtgttcgcatttatcctcagatgaggaaacattttagccattatttctttaaacatactttgtacctctttttacctttcttctaattgtggaactctcattatgtaagttatccttttcctttttaaaatttttttttgctcatctgaatggataatttcaaacattttgtcttctggcccactcattctttcttctacttgaccaagtctgctgctgaaggtttctgttggcttttttagttcagtcattgtatcatttatctctagaatttctatctgaaaaaggagacgttttatctgttgttacataaatacaaaagctaataagagaaaatttgaacatttatatgccaataaattaaataatctagaagaaatggataagttcctggaaacatacaacctaccaatatcaaatcatgaagaaatattaaatctgaatctatcaataatgagtagcaagattgaatttgtagtgaaaagtcacccatcaaaaaaatcccaaacttcaaatcttcactgatgaattctactgaatatttaaagattaattaatatcaattctactcaaacttttccaaaaattatataggagggaatactttcaaacttagtatttgaggccagtattactctaatattaaaagcagacaagggcacacacacacacacacacacacacacacacacacacacacaaatccaggccaatattcctggatcctcaaccaatactggtaaaccaacttaacacagtaaaaagattattgactataatcaagttggcttcatcccactttattcaaaatatgcaaatcaatcaaccaaacagaatcaataacaaaaacattatattatttcaataaatgcagaaaaagtgattttgtaaaaatcagcatttctttaagataaaaaccctcaatgaattaggtatagagagaaggtatctcaacacaataaaggctctatataacaagcccacagctaatattctaccaaacaaagtaaagttgaaagcctttcttctaagatctgtagcaagacaagtatcccacttcaccacttctattcaacattgtactataagtcctaactagagcaactagaaaagagaaagaaataaatggcattcaaattggagagagagaagttaattgtctctgtttgcaaatgacatgatctcatatagagaaaactttgaagactccactaaaaactgttagaactggtaaacaaattcagtaaagtcatatgatacataatccacatacacatatcagtagcatatctgtatactgactgttaattgtctaaaaatgaaatcaagaaaacaatctcatttcgaatagctgcaaataaatacttaataataaatttatccaaggaggtgaaaaatttattcactgaaaattataaaacatttatgaaagaaatggaaaaggaaacaattatatagaaagatgttctgcattcatggattagaagaattaatatttttcaaatgtctatggtacccaaaataatttatagactcaatgacatctctattaaaattccaatgacattatccatggaaataaaaaaatgcctaaaaatatgtttggaaatgcaaattatcccaaatagccaaagcaatctagagttaaaagaacaaagatgaacatattgcactacttgatatcaaaatatactacaaagttaaagtagccaaacatggtactggcataaaaacagactccaggctcatagtcccattgaacagaatagagagcccacatataaatttaggcatgtaaagtgaactgattttcaacatagatgtcaagaacgggcaatggagaaaggacaatatcttaaataaatggtattggaaaaactagatattcatatacagaagaaattagacccttatctctggtcatacacaaaaatcaactcaaaatggattaaatactgaaatttaagacacggaacaatagacttctagaagaaacatagaggaaaatattcatgacatatatttggacaaaggctttttggatatatcctcaaaagcacagataacaaaagtaaaaagagacaaatgggattatatcaaactaaaaatcttctgtataacaaaggaaacaatcagtagagtcaagaaacaacctagagaatgggagaatatatttgcaaatcatacatcaaagaagggctaatatacaaaatgtacaaagaaaagctgtacaacaaaggaaataaataaccctacttaaaatgggcaaaggatacaaataggcatttctcaaaagaaggcatacaaatgacctacagatacatgaaaaactgttcaacatttctaatcatcaaagcaatgcaaattaaaaccataagatatgacctcatacctgttagactggctatcattaaaaagatgaaagataaccaaggttgtcaaggatgtggagaaaatgaaacctttgtaacctgttattattttaaattaataaagcaactgtgtaaaatagtttggaaaattctgaaaaagatctagaagtagaattaccatataatccaacaataatactactgggtatatatcccccaaattgaaatgtttcccaaaaaatatatttgcactcccatgtttatttaagcattattcacaataaccaagatatagaaacaacctaagggtgaatgaatgaatgaaaaaaatttttaagtgtgatgtgcgtgtgtatgtatatgtattcgactatttttaaaagaacaggaaattcagtcatttgcagcaacacagacaaatctagaaaacatgttaagtgaaataagccagacatagaaagacgaatactgtatgatctcactcatacgtgaaatcttaaaaagttgaacttatagaagcaaggaatagaatggtggttatcactggctgttggggaagggtgagaggagaaagaggagaagttgatcaatttgttcaaccttacagttagatagaaataaggtctgagattctattgcacagtagagtggctatagttaatattctattatgtctttcaagatgcctggcagagaagatttttaatgtttttaccacaaaggaataataaatgtttgaggtgatgaagaatacgctaattaccctgatttgatcattgcaaaatgcatacacttatcaaaaccacattgtaacccataaatgtgtagaattattattggtcaaataaaaataaagtaaaactttaaaaaaatgaaagagaagttggtggatcaatattccagcaacactgagtctaatttgcccatggcagtaacttactccttaaagtttgttttcttcctttctagtctcatttccccctatcttagtgcatcttgggatcacgacgacataaattaattgaaccataagccttaactttgcagtctgtttttttgggggggacacaaattgagatatatttgtattccctgaaggggataaaatgatttagactttcaaaaattatttcaatgtatgctgtaatactgaatgcaatgtatcttataaaggatttacataagagtaacctgtagaaaaaataactctgaaaatctatgatgacattgacaaaaagtgacctcagtatagtaaagaaagtaaacactaaatcactaaatctaatttcaaactgatttaaattagtctgttattctcctgtactacttcttcttatttattctctcttactttttttttttttttttttttgcttaacaatgaattattcaaaatatacggagacaaaaaaaggctttagtgataagggagttttaagttttcccttctttaacagaaggatacgttaacagaagggacacatgaaattcaaataaaattgtggttatatttgtatacctatagggaaatgtattctatgtatagaatgtatattctatgtatagaatgtatattctatgtatagaatgtattctatgtttgttgtattttatttgaagaattattttatagtcctctctatttacttttttgttattaatgataacttttgctccctttgaaaatatttttatagtgaacacctgtggcttatattttatacgtagttttggtatttgttacaagggaagaataatcatagggaaactaactttcttggaggaacagcagaaagcatcaagtaaagttagaaagaaaaggattaagtttcagcaaaagagacatttttgcataatttctagaaaataattcatttagaaagaggaagatttattaaaaatatgctgaaagtcagcatatgttacctttctgtatccaaaggaaaataataaaatctacgaacacaaagtgtgatgaagcagaactgagtcacagacttcactacctagaggcactgacaagagcatggctcctcagacaagtgacaacagagacaatggtttccaattatcagtggagcaagggttatttttgtttttgttttaatatctcctttaatatctcctcttgtgaggtgttcatgggaaaaattatgacaaagaaaaacggtaacttcttatatcatttaattttctagtaattctgtataaatacgaaaatattttagccagtttgccacacctgttctgactgatagaactgagaaagtggatacatcaataagtcagctcacttactacttgtggagggatgccaaatatcagacaagctcacctgaaaatgaaaatactgaaaaaagtgtccatgacatagcattaaaattgccaatgcttgcattttctctatcattattccttttttgagttgttgtctcttatactttgtaatattatgagttctgggacataaaaacttagcaagacctgtaactcatttcctctcacttgcagtgatgcctgtaaaaaatgaacaacctcaaacaaatcttgtagtaaaaatgtcagaaagcagaccttataaacacacaaatggagtttatggcatgaagtggagagttcttatctataagatgtttgggtgctgaacagatttggtctttctagtttgcttattgcaattactcttaaagttttgtgatctatggggttgggattactggcttgttagagaaatgggtcagtcacatgtgttcattatttaatgaggtataaaataaaaattttatttaaccaagtggcttacgctatgaagcaatgcaccattataccttactcaatacccatccacatactaaatctgagattgagaagcattctaatgctattgagcaaggagcttcaaaggacaggtgcacaggagggcctcagatttctccaagggaaatgcctcacccgtttgtttcttataacattaataaagtcgacattggtttcaatcataagatccataattcatgtgagtcatatttgacaattcaatcttacatgttaccatgttctaattttaggcaagatattttgttctaccatagaatgagatacttgggacttcgtaattcttggtcaaaaatagacaactgttagtcatttgctgatgataagattcttgagtgctaaaaactgctaagtactcttctaggaaaagttataacttcatggtatttaaaattaagtgactaagttacataataaacatgcaaatgaagtcgtgttaaagagcaatgagggagtacgaagtgttatccaatccaaggaagggctagctagaaagtagatgttctgctaaagttctgaataaattaaagaagtaaacagtgtttcttgtgggcaacagaatattgggaaaaaatgaaaaaagagttcatcaacttaggtggaaattagtttgttgtatgtgtttgaggaatgaaaaagaatgccagcgtcttaaactggattcactcaaaatcaaaacctgagataaagaagtacatgcagtaagattatttttgaaaatgagccatttgtcaagagtgggaggcagaaaagagtgaaataggcaagtaggaaatgctaatctaagctgtcagcaagctgaacccttctgtaggaaaatgagacttaatcctagtggggactctgagggatcatgtaaaattgatttcagaatctgccactaaaggaacaaagaagatgcaatttaatctatcagtacatatagattattggtcaagattcactagggttaacactcacatttttgggtttgtaaatacacagaatagctaagatttttttacatgaaagtagaagagaagtcccttgggcagatagcaacagacatgtggtaaatcctaggcagacgctctgtttgtgtctggttgcagctgttctttgaggtgatggcaagagcataaaggtgagctggaagattggatagcatgtaaaaagttcctcctacccagcgtccaatacacttcaccctttgcactaatcaccttcagtccttctgtgtttaaattccaatacattctacagccttcaagattgtggcatgcctcattctctaggaaatatttaataaacaaagttaattgtaatgagcttaagtaagtggtttttaagaccgtacttaatatttttccacttcagaattttctcatttttatccaattcttcaaaatgtatagatttctggcaaaatgggagtggagggggggtggttctaactcatttaactaaagagtaggagtctttagttgccttattcttgttaagatttagttttacaattgttcatttacagttatcattgggcatgaaacatccaggaacaccctaggcaataccttgatgtactccatgcttccaccattgtgtaggagcaatctcaatatcatatggatacaattaagtccttttctcagtggtagaattttctagctttggtctgaaaagggggtatagatctcaatttttaatatggcagctaagttagacatttgctcagcagctttcaattttttttctggttagggaaatcaattaacaccttaattagctcccatctgtcttaacattaagcaatattctgatctattagtcattcttgcaggtccttgtgggtaaaggcacctggttgactttctaatcttgatgctcattatgacagttactttgaaactatttctgatgataagtgttgatcttctggcctcttcaattacagaatccaagcccagtggtcctagggagctcagttccatggcagtgtcttctaatgtcagctctggcctagagaaggaggcacacctgggcttctcagagatgtcagcgtatatcttagcagtttattttttactgttattgaaagaaatacaataatctttgcttatctgaagtttcacttttcacagttgtagttacttgtgatcaatcacagtctgagaatattaaatagaaaattccagaaataattcagaagttttaaatggtgcaccattttgagtagcatgatgaaatctcatggtatttcactctgtcccaccggggatgtgaatcatgcctttgtccagtgtgtccatgctgtagacactacccactcattagtgatgaagtatccatcttacttatcagatcaaaaaagccatagtatacatagggttcagtactatccatggtttcaggcatccactggaaatctttgaacctacatgaataaagggggattactatatcctctgatatttcccatgtaacatgcttcactggtagggtttctaatctcacatattggatttcttccattttcctcatctacctgcatcttctgaaattgttctgaatattctatttcatccaccatagataatcattgtttttaaaatttaaagagcaattctaagcattgtctacaggtgtccttgccaggacattaaacattgagtcacagtggcatgcccctgcgtcaataataagccatctattttgtagtcctggtccaaatcttcacttccagatacattccaacatatgctccctaatatttttcaatacttatcagtcatatcttttagttatttggatgtgcttgtcttttttctcctagataaattactatattatcttgcctttgctctgtttcacttgtccctacttagagactaggaaactatgagaggagatagggtcagaaattgaataatctaagcatcatcctgcaagacacctgaaccagatgaggcctttaccagagctctatgtaagaacaacatttaatatgggaaaggagctatttcttccaaactagctattgaatatgactgtggaaattcaatattctcagggttttccagataattgcgcacatcctgggtccttaggtctttctttccgacaaattcgggctcttctctggcacaggagacacatgggagttaaacattcagtgtccattgtaactctgacatctttatatttaaatactgagtcttattttcatcaatatctgctctgttctgccaggatgactttacagtatgccttcagttgataatttaagcctgtaattttcttttctttttttttttttttggcttctaaaactgtaaactaaggacaatgaattgcacagtccttaatattactattgctcttatattgataatgtgtgttgttactatgcaaaccaacgcttcatgttctctttgtaccaaattctaatttatctcctgtaaatatcttaactataatgctactacatgacaagaattactgcttcacttaccactggcaatgggaagcttattggagtttggagcaacattattcaccaaaacaataagggccactgctgtcactaattgtcttcgtttgggttacctggaaagaaaaaaaaagatgataaaagaatttgtatgcatctggagcaagagcaagaggacaggaaaagtggaagagtgagagacagaagaaagaaaagtcaatcaaaggctgagtgcctttattcattattatagttgagagttgaacagttaaggcataaacctcttagtaatctttaaggagcagtgtaaaatagacctcttagttgtctaatagaatgagcgtggttgaaaaaaagttgaacaagcagaaaatgaggttacaaaggtaagcatggacaagatcacatgataccttgggctttggattttatttgggtttaatgggaactcactgttggggtgatggcagaagaaaaataacaagatcttatttatatttctaaaagatgcctgttgatgctgtttggagaagaaagcgtggtgttagggagactaatagaaacctgcataagtagtccaaacaaaaaagtggctagtggtggcatcagagctagtcaagatcttcttttgtttatgagacagagtctcactctgtcgccaaggccggagtgcaatggcaggatctcagttcactgcaacctccacctcccaggttcaagcgattctcctgcctcagtctccctagtagctgggactactagggacgaaccaccatgcctggctaatttttgtaatttttttagtagagatggggtttcaccatgctggccaggctggtcttgaactcctgacctcgtgatccacctgcctcggcctcccaaaatgctgggattacaggtgtgagccactgcacctggcctttgaagatcttcttaacatgaaatgaattttaaaagtaggttcaacatgtgatatggaaataaagaccatgaggatgacactgaagtttttgtttttgtttatttcccctttggttaggtgggttatttttggagtgatttgctggtacaaagaagactggcaggcatatggaattgctgaaattgatgctttgccttggacatgtgaaagatgcttgtttgattggcatccaagtacaaatgttaggtggaaagctggatacaaaagtaaagcttagggccaattggggactggctatatacattcaggagtaattaatcaatagatgttacttaaagccatggaaactcactacgaacatagtgagtcatagggagaaaataatttctaagcatgtagtgaataatcctaatgtttactgattagacagaaattctaatacttagagactgaagagaatgacaggagaaggaatagttagtaaattgtatgaaaaacgagaagactcttatgacccagaaaacaagtgaagaaactggttaatgagagaggcacctatcacctttgtcaaatattgttgaaaggtaccaagtttactttaggaatttaaaaatggtgagattgaaaagaatggtttcagtggtttgaccttgatgaatgtttaattgcagaggtatagcaagaataagataatagtcaataatggtgaatatatttatatatgtatgtatgtgcatatatgtatgtgtctacatgtatatacagataactttaaaagttttctttaatacacagggacaagtaaataaggaatttgcataattttaaatttgattactatgcatcaagttaaatagtgatagaactaatctaataaattatttaaatatgccatggcatgagagaacaaataactaccaaagggaatacactgatttgctaagttagaatgaggttcagtgtaaaacagaggacgtgatcttagatataaacactggctatgtattcactgtgaggaaagggaaagaatggtcgggcctatagattccagtggattggttcatttggtgatgtaggtgaaggaattcacttttaagttgtactatattttcggtaaaataataatattagcttaaaatagggagtgaagaaattttctcactgaacagttatgtgaattggctaggaaatgtaatagccttgccaagaagtcctgagcatacactccatgcttgcggttataaatttaaagtgagacaagtccataccattgtgtgtgcatatgagtgtgtgtgtgcaagcaaagttagttgctttcaaattcactgatgtagttagaaggttatatagaaatagatctttctgggtatggttaaacatggaagtaaaattgaagttatctgagaaaaagtaattatattaacataccttgaattctaagttgggtaaggaggggaggatgaagagtggtaaaggtgatagagttaatagactggagttcaaggtgaagtcaaagtttttctttttgtttcaagtaggaagagtaagagaaataagttgaaagatagaaattttaaatcatagccgagatccatgaatctaaatttctgaagatggtggagtaattggcaatgataaacactaaagtatgagaacactagactatgaagtatggaagaagaaaattgtatgattgatgaagagcttaaggaattagaaggcccaagaggtgcataaatggcacatatatgaagcagaccttacatgtctcattttatattttctgtctgtttagtttcacagggaaaaaatgaaattattacttttttttattgaacccccatgataaatagcaaaaatgactacaaattatttcatttatcaagaagtggtatctatttctccatcttttaaattggtatgggttatgtgaattgctttggccaatgggaaataagcaaatgttaaaagcagagacttggaaagcatttgagcatttgggtttactctatgtgtagtgttttgacctttcaactaccatgtgaagatgcccagactatcctcctgaataacaagaagcaagaagcagtctcttccaaattgccaagagcctgcttgctgtcagtcacgtgagctagttcaccacaaatcatccagctattcattgacagcagaaaacagctaggctggcacagttaagactttccaacaaacccacagaattaggaaccacatacataattattgtctcaagccactgacatttaggaagtagtgtgttatacagcaatagataattgagaaacatgttgtgcttggaagtggtgttttctttggaaatggagatagtgatgactggaaacagcagagaagaaactattatgtgatgctagaaaaacgtgcataatctgtaaatgaaggtgagaaaattattctgataagatgaaaaaaagataacccttattattttgtagtaaaacagctgcaaaactatcagcccctctaactctgaaggttgttacatgtatgtaatgaacatatctagcgcaacattggatgtctttgggggaaggggaagggcatgggtaacttgactgtttagaccagaggaagcatatccaactctgccttctagacatgattttagattacttttttttttcctgaaacagaggcttgctcttttgcccaggctggagtggtgtggcaccaccataggtcactacggcattgacctggcctcaagcgatcctcccacattagcctcccgagtagctgggactgtagttgtgcattacgatgctcgctattgtgtgtgtgtgtgtgtgtgtgtgtgtgtgtgtgtgtgtgtgtgtgtatagacagggtctccccaggttgcccagcctgatctcaaactcttggtctcaagggatcctcccaccttggcctccaacactgttggaattataggcgtgaaccactacacctaactagaattttgtattttgaccctaaggggaaaattatatgaaacattttggatccctggagtaagagtgagcacattattcatgtgacagaaatgtaaacaaatagcagccaggggagaattgtgattgaatatcaaatgctcacaagtcttccctttctatgaagatgggcattttccacctcttgaacctgaaacagtcatgtgactttctttggaaatgtggctttataataaatgtaacacaagcaaagacttgataagtgcttgtatattggggctggcttctcttgcagcttttgtaaatgtgcaatcagtatttgaagaaattcagagtagcttgctgaatgacaagagaaataaaactcgggtgtctctgtcactctaaacagcctgtaggagccacacatgtgaatgaggatatccttgattgtctggatgcaagatgactcaccagttgatagcaaatatatatatatatgtgtgtgtgtgtgtgtgtgtgtgtgtgtgtgtatatgtgtgtgtgtgtatatatatatatgtatatctggatatatatgtgtgtgtgtatatatatatatacacacacacacatatatatacatatatatacacacacacatatatccagacatacatatatatatacacaaatacacatatatatatatatatatttgctatcaactggtgggtgctatcaactggtgtgtgtgtgtatatatatatatctacacacacacacacacacacacacacacacatacacacatatatatctggacaagccccacagctatcagctgacctgtcccagacccaagaatcaagcggactcatataactgtatgataattaaatggttaatgttgaaacactaaattttgagatgcttccttaagcaatgaaataactggaaatcttttctctctagagatcactttgctgtcagtgggctttgaagccaccactgtattttatccaaccatagtcacacaagaacattctcataatgtggtaatgacattgtcgttttaatttacctcagtgatatacacttaaaaaaactaaactgaaaatataattatgtcaatgtgcaggaagcttttgagaaatattttttaaaaatccattctggcactattctgtattatatgagttatatttttgtggaaattgttttaagtataagcttctaaaatatgattatacacatagtaattataccattatctatcagctccttatttccacatgctcagtctactttcttggtagagatatatcttatccaaaaaatatacattaaggatttgtagtattattgtatgtagtaattaagagtggcttaaccctttgaagtgacttaattcattatatttatgcctataattttaacaatatgtataagaaagaagacctcatggtagtttatgttctagatattttacaacaaatgatatggcacataatacaaatatgtgttgcctcattattcaaagaattaaaaacatttatcagacttactagaatttactgatccaaactcctcaaacaattagactttgaatagtcaatgagaatatatttcttctcctttttcagcactattcacagaatatgttatcaattttctgtcactctctctccctgaagaaaccaatattacttcgattctatatagaaaataaaagaggtatcctgaaaaataaaaatggatttgactttttttttttctgtgtaagaattcagacattagcagcactgaatcttatcagatcaattccccgcagaaggctaaagcctgcagtggtccaggttctgtaaactctacagacgtgagacaagaatgataaaggaagactactaaatattcctttgctaaaccgtgcatgcaatgcatgttgattgcccctggttttaactatctacactgtaaataagaggtctataagccaagtagttaaaggtgaaagactcttctattatccttttaattccaataaaactattcaaccaattttattcacttacactgttaataaaatagaccctatgctttagaaacctggctcaaatagaaaacagaaaaaaagttcttacctttcgtatttttctctccaacttctacatattaattaatcttgtgctctgtatttggaaccatgaaaacaaattttatttttctattcggtcaagtaaaaatactatgtatagaaaaactctagacagattgagactccatctcaaaaaaaaaaaaaaaaaaaaaaagaagagaggaggaaaactctaagaatgagaaattgctatggagtttaatgttgattccagaacatacccactgaataggaggcgcaaggtatcaatgttaactagttgaaatacaaattgaatttttaaattaagtaaagtcagggtaatccagatgtcaccttggaaaggagactaaacgagaaatttaggatgtgtttgtcataatttatattactctaatgagaggaatcaatgcaatcaaaagcaccttatcattcagactagttggagagaaatgcccaaatcaaagttgtagcaccacgtgtttccattcatatttccgtggtgatatgaacttcaaattacagtgctcgtattgaatgcatgtgagactaaacacgaattggcctggcatgctgactcatgcctggaatcctaccactttgggaggtcgaggtgggagaatcacttgaggccaaaagttcaaggccattttgcgcaacatgggaagaccctctctacagaaaagaaaaaaaaatggtgcacttttgtagtcctggctgctcaagaggctgaggtgtgaggatggactgatcccaggagttcaaggttatagtcagctatgaccacaccacagcgctctagcatgggtggcagagtgagaccctgtctctaaaagatgaattgatcattaagtaattaaaagacattaattaagacaagaaactcaaatcagcgagcaacaactaggagaaaggtgtgtggaggatttttgtagcagtttgccatagatcaagcataaaggctggaagggatggatatgacaggtacaaagagagtgacttaagtctaaatattcaagacagggattttctgaatacagaaaacttttctcatctctggcgaacttgaactagaatcagtattaagtgaagattatgtgatgaatatctggcatacatcattgaatctatttccaaatctcttgtggatcaacttccagaaactaggactgagaaaggagaggttctcacacttcaggtactttccataaagattttttgaacctagaaatctacgtctgggtttattttctgctttcactatcatcccagaggtccaggacctgctgctcatcgtatttgaaagggaggctaagagtcaattgtttctaaattctgaggcaatttacagttgatgtgatcttttgttcatgagcctttgaggccaaaatttcaagttaaccgattttagtttatttgctcctgtatgcatgaaatagatgagacaaagaacaactgatatttactgagcttcatttgaattttgatgggaaccctattctcagctcttaccctaaagtgcagtaacctatcagtggtttccaaatccctggggcttatctgaatgcatcacttaagctggagtaggtttctgagactgggtaataaaacttgctgaaacaggaatggaatacttaaagaaaatactgaggacaatttttttattaatatttcatttctggtctaaaaaaatgatatgtgtttgatccctccacttcactaggcattgtaatttagtgaacattctgatacttagatttcagaaaccttccccagagtctctttgcaaattgtgactcaactgcattcacagatggagtgcaaaaactgagatcagatgttgatgttgaaagtactgcagaaggcacaagtaaatgacaatacagaaaaaacaggtcattaactggtgtacgaataaagtagccaaaggtttttctgatttttgaatagaaaccttttgccttcagagacttttctcttacccatttcaattggattttcttttacttcaattagacaacaagcagacaacaacacaactacctttatactagtgaagagtaatcatttctatatgagtaataatgcaacatgaaaaatcccacaaaatattgtttaataaactaagtcttgtggatgtgtgtgaaaaagctagccagaaatattcttttttctaattctgtagtagaagaatttaatgtgatgactttaggtgtgtgtgcatgtgcctacatgtgtgaacaagtatacatgggtgtactgtgtgtgtgtatcacgtggtgcaaaactaattgcggtttttggatttacctttaatggcaagaccagcaattctttttgcaccaacctaatatttaagttacatgtcctatgaaaattataatgccttctgcaattaattgttaaatatgaagtaagaaaatcaacattaatgtgtttgataaatctttgtcgcatatgcttatcagctaagtgtttattatacaggacctcacctcacacacctgagaaaacacatcacacgtctaccttcatgaaaacatgaacttgctactcccaccattattagtgtagacagagaagtatcacaggttatgtagggcatcctaacttatctgaatcttgtttcacagtgaaattaccgtttctgtttatatttagaaggggatattggaatgcactcaccttttttttctctaaagtctcatataaaagtgagttaaaataagttcctttttggtattgttcataagtattaaaacattaaatatgtttatcatcacctaaaaaacataagattacaaagctgtggttttagccaacttttttaactttatgtgcctagaatgtaatatttccggcaatctggcaagagttcacacatctgcacctcttccagtttcccgtggcaggtgagtttctcctttgttaaattgtttggcaggcagctgtgaatttataaatttgcaacagatgtctccaatcagaatcatatacattttgtagtctaaggctgagtctggggaagctgaacaggacagggaaggatgtataattttattttatctaaaaatttataaattttagtttttgtgtgaaagttgtgctttttacacctaggtaaacaatctgagtaaaataaataaacagaggagtattccataaatggattcaactgagaaattaatctcaaaaactttggttttaaaatatatatgctttctaaaaaatatttttcttggtagaattaagaataatatatgtccaaaaatcattttacatcctttcatggaaatagacctctaatataatatgaggtcatcacactgaataaaatgctcattatatctttattcttactacaagtaggaaaattcatgaagctatagattactactggggggaaatgaacaattggagttattagttagtttaattatatttttaaatggtgctcctgtctaaattattataataacattctactttgatttagtgattcaaacacaaatatccacatggaggtaactgagacataagctgagtcgggcatggccgttgctcaagcattaccagtggtattatcttcacatcacttatcccaatacaccccaatgtttgtcttttatgatttacataatattagattgtctctctgctacctctgtcttggtccccattagaacaaacatacctttctctgtactcaacagatcccactttctgtcatcctgcttttttacacttagtctatattttattactcagtctttctctgcatggcaattcattcgaattcatataaatacctacctcacacatacacacttttatgtacacacataaaaataataagcatacacaaaaattctcaagatattcacatatgcacaactggaataatagaatgcatattagttttaacagataattagcttatgttttattagggttttgtttaattcagttttgctccaatcttcactcatccaactctcagacatatcctccaacacacatacataaacacgtacacttacacagagtacaaacatagaaagaaaacaaaacaccagattaactgattgtattctacgttaatttcttgttaatatcacaattatattattgtatataatgttgtttataatatataatattactgcatagatataaatactttatcaggtataagtggattttaggatttttgattttcaaaaataatattgtataatatctatttcttctgtattttgccattctcaccttcaagacaataattacttatagtctgctaaattccattctaagcactgtggacataacattgaacaaaagagatccgaaagagcttaaatcaatgaaaagctttctaaatagtaaaacattctttagttataaatttctttctaaactcttccttttatattggaaggaaaaacattatttctttatatagatttgcttccaagctattatatccatttttacttttgcttttctgatagtataattttcagatgttcacacatctgtttggacacaaaatgagcaggtagggcccactaaatcctaaaatatacagttatttcagccagtattatcctatcattagcatatcaattgtgggatagtggcaaggaaaattcaaatgatgtggtttggcaagagtcccaaaagatcagatggtttgtattatttcctaaactctatgttttattattttataactttatttttgtctcatttcctcaacttcactaccacaaaactttatctaaataagggttttattttggtacctcaacaaataatataacctttaatatttagaatttaactttggacccaaatcctttcaatatttactcccttgtatactttgttattgcacattctagtatactatcccaaggtcttcctgtcaaggtgctgttaaacacacatgaagagtacatcaaaaattcattgttttcttagaaatcagagcttcttttgataatctacacatcttcattcataccttttaactattagaggccacctccattaccttgagtagtaacatagaaattcataaaagtgtccttctatttaagtgtccttcattcactttgtaatttctttttttaatctttttttttattatactttaagttttacggtagatgtgcacaacgtgcaggttagttacttatgtatacatgtgccatgttggtgtgctgcacccagtaactcgtcatttaacattaggaatatctccaaatgctatccctcccccctcccgccaccccacaacaggccccggtgtgtgatgttccccttcctgtgtccatgtgttctcattgttcaattctcacctatgagtgagaacatgcggtgtttggttttttgtccttgcgatagtttgctgagaatgatggtttccagcttcatccatgtccctacaaaggacatgaactcatcatttttatggctgcgtagtattccatggtgtatatgtgccacattttcttaatccagtctatcactgttggacatttggcttggttccaagtctttgctattgtgaatagtgccacaataaacatacatgtgcatggtgtctttatagcagcatgattgaacagacatttctcaaaagaagacatttatgcagccaaaagacacatgaaaaaatgctcatcatcactggccatcagagaaatgcaaatcaaaaccacaatgagataccatctcacaccagttagaatggccatcattaaaaagtcaggaaacaacaggtgctggagaggatgtggagaaataggaacacttttacactgctggtgggactgtaaactagttcaaccattgtggaagtcagtgtggcgattcctcagggatctagaactagaaataccatttgacccagcaatcccattactgggtatatacccaaaggattatatatcactttgtaatttctaaagtgaaagaagaaagtgtaacagcaactagtttagaacgaagagtgtagagactaatgtaggggacataaaaggaaattgaaaagacaaatgaggctttgcaggcaaacgaaaagtttcttgaatcagaggtaaaatttaaggttagccatctgagccaaaggaaagttattaccatttcttgaatatttgccatatgacaagtcttgcaagtaattgtttatgtgtaaaagtgtgcctcattgccattaatattaccacaaatcataggcttcagacatgaagtgttttacggaacagaacactggactttgaagttattccgaatgctttaaattgtcaagaatagtcacttcattataatctttgtaagttttatttaattactgattggttactgggagaaactaatgtgttagtcttttatcaccaaacacagctgcatgaatttacttagttgacttgccttgggaggataaatcccctgataaaatggggcatatggggtgaacatttaattgggattgaggtgatttaaggacagtagacccaggtaaaaatatattaaagaattagccatgttcatacacaaatacaaatgaaaacgtcctctttggctggctttatagtgagagatagcaacatgacatttatattaaaatgtatattcctctttttggaaattatcatttatctgacagttaagaaaacaattgatgaaatctggggcaaatagagaaacatgaggaaatataaacatttcaaataaaggggattaaagaggattaagatactaattatacgtttatgtatacagcatattttcattcatgttctcatgtaaagacaatcacttttgactttcacaactctttgagagaaacatgttgatgttttgttgttttaattgttagcaacaacaacaaaagttgagattcataaaatttaaaataaattatgaaaagccaagaatcaataaactgactcaatttggaaaaactaggtccaagatgagttcaaaattaatagggatttttaatttaaaagatattacctaatgtttcctaaggatatatttttcctcactaaagtatctttggagacatataaagagctgaccattataataaaattaagttataattctaattttgacccaacatttaagaaaattccactgacagaaaatctagtgtagtaaattaatagacgcaatgagaaactggaacataatttaccattaaaagagaggaaaacatacgaaactctggaagattgaaaaaaaaacagggtggtgatgctatatagttatctgaatgcttacaacaatcattctgtcatgttaaaaattgttttttcttttttccaaaagggttacttttccacaactccattcatagttcctcttataatacacttcacatataaaataacaagtatataaagcaaatctaagggatcaatgggtgtaaattaggatttacattgtatgaagcaatttacaattaaaacaattctgcatacaactataaagaatagagaagttctgtttagtagaggaaacactaactgtaattttatagagcactatttttaataagattatcagagaagacagaaaaaagtttagggaatgtcccatctcaacccattagagacagtgtggtgaatttctgctatatattagggaaaaaattataaaaattgatctgatcttcatctacggccctgaatgtagtccaatgataaagattaaaaccacccactacaaatatgtccataaccacttgacatgaattattgcagttaatcatttaaaaacctgtaagaaaagtatattctcagcaacacatgaatatcttgagccaaagatgttttaaataatataactaaggtctaatagtagttttcggagcctggaaacaaaccacctaacaaatcagctaaagacaactgaaagaaacttataataaactaagttacgtttattatttgacaagtaaaatacatacaagaaaaaataatattgaaacttaaaggaaaactgaagatcaagtatccccaagaaacgttaagcaaggtaaagaaagaaagagagagagagaaagagataaaaaaaaattaagacatataaaaattaacaacaaggagaattccttgacttttaaaattatttttatttacataacgatttatcttgacttttatttttagcttttggggtatttcagttttttagaattataaatattgatgctcatgaacatgtttgcacacaaatgcttttatagctctaattatttccttacagttgattctcagagttgaaacaacttggataaaaggtgtaagcatttttaaggctctttgtaactgtttcaaaatgaatatggtgtatgatagtgtcttttaaaaaaatgctaaataggtatgtgcttagcaatggagcttcaaaatgcaagaagcaataattgagaaggctcaaaacagaagagatactttaattttgaaatatttggatattttaatctctcaatttatagggcagactaatctctcaatttatagggcagacacagaaaattagtaatgttagagaactactggacaacactatcaatacattgatcttattgccatttatagaacactctctcactccaacaacaacagagtattactttctaatcacatgcaccatttttgtgatgccatattctggttcctaaaacaaagtccaatattaaaagaattgaaatcatgcaaaacacattttcagagtgtagcaccattgcacttaaaagcaattaatagaagatactggaaagtttgcaaatgttaaggagttgggtaccattttaagccttgtaaatcccatcttgaattctggtggaaactgaaacttacagaattcagcaaatgtcagggacttgtacaggtgtaattagatgggtagactggaaagtccaagagcatgacttaggtatctgcttgggttatagtgagggccccatgctgcatcacatgatgcagaagcagaaggggaagtggatgtgtgcaaagacagcaaacacaaagggaaactttgctttatcacaactcactcttgtggtagctaatccagtcacacaagaacgagaactcactactgaaagaatgtcatcaagccactcaccaggatggagctcccatgacacaaatgcctcctattaggccctactcccaaaagtttccagctactaacattgctgcactgggaattaaggttctagcatgagttttggtggggacatgcaaaccacagcaatatatattaggaaacaatataaatattgatctactgcagttgcagtaattaaacaaacattgagagtgttcatctaaaattataacagtaactttgagaagttatgaaaaattgtaccactagcaaaactgaagtcagaaaagattaggaaaaaataataatgtcaatagacttatttattaaataatttaagtctgtaaaaaatataaaaaaacttttgaaaacattcatgaacaaaacacttatcaaggccagattaatgttaaagtactatcaaacattcaaggagtaataataacaatttaattttactttttatatatgtaacatataaatgtaataacaggctaatttagaagtgtgactatcaccataccaacttataaattgaacagaactttcttacaaaaactagacaagaaaattacaatccaacacttcattaaggcacattaaatgattctaaataaaatatcataaaaatgaactcaacaacttataaagagaataacacatcagaacaaattggtttgtcccttgaatacaaagttgttttataatattaaaaatctcactcacattaagagattaaatatataattaaatatacaaatatgtaattttattaaaaatgaaacatataagtagaaattctaaatgtatttcatattgtctaacatatattattgaaaaagtcatttgtatattacaaatgaagggaagcatcttttatctgataaaagttttataaagactgttataaattattcttcattgtgaaatatttaaacatttgtcattgtccacaaaagaaaaaacacagagtatccttaattattctactttatactaaaaacctaagtacatgtatacttgaaatgattactttaagataataattgcctgtatacagtttaatatcctatctactagtaaaggaacagaatttataagatgattaagccatggattgaattaaacacataaaatcacatatagaaaacacattcaatgtaaaagtcaacaaattttcttcacattggtaacaagatgttgaaagatataatttaataatattagaattcaagatagcaatttaaaaatatagaatacataaaagaagtctacaatatatgaagaaaatgaaaatatactgttttggataaaatgaatcaatattttaaaaatttccaatgtattcaaaattgatccatatttgtcaatcaaaacatttataaaatattaagttcacttaagtgaattcttcttgagataacacaataacagatagtataaatgtttctgaagaaacaaagtaagcattaatcttttgcctaccagctaacaaatgtagtatcagaaggcttagataaataaaaacaaatcaattgattataaaatgatgccagatatgaaactgatcaatatatatgaaatgtgtgtgtgtgtttctgtgtatccaggttgacattgcagatgagaggaaaacagtgctttaatagttatacagttccaaaaatatatggatccctacctcactccatacacaaaaactaaatctggttaattacaaactaacatggtgactaaattaacttaattttatttaatattatgttttgcaactgattagttccatgtgatttaatttattagattattttgattgggtttgtatctcttttgttgattttttcccaaaaataatttctttctgtttgtaagaattgctatattctcttaacttgaactttcaaaacttcagtttaaaatttcctactttttaaatactgcattgccttttctacaatttagtgagttcttttatgtttaagttagagagtaaatatcaagggtgaatttcaatcattgtgactctctctaggatccagaaatatattagtactttactctcttaggtgcaaaagtggaggaaaactttgacttctaccagctgagctcttccttggggttagactaatgtctctagagctgagatttcagaagcaggaggaattacacatggctgccatagaaaacaggcaaccagctgtcgacagcctcacactccaatgtgggcatatctcaatgcccattggagaacataacagtcacaagccatatggctagaacaacattatctccccccaggttattcttttctcaaccatctatgaaaagttccttattttttccatgtaaaacaataatgcattaatatgaaaatttttgtacttggtaaattgcatatctgagaaagcgaaagataattttattttgctgaaatataattacttcgtctaaattgtatacattaggacaaaagataatacggggaatctaaaacaaattgatccatagaaatagtacgagtgtggctaccagaggcaagagtaatgggctgggatgtgagacaggggaggatgggagatgcaggtcaaatgatttaaagttgtagttacgttgggtgaataagtatttagatttagtgcactgcatgaaacctatagctaataatgttgtattgtataatggaaatttgccaagagaatagattttagatattcttgccataaaaaaataagaaaggtaactacaggaaatattgactatgttaatttgcttgactgtagtaattgcctcatggtgtatatgcatatcaaaatatcatgttgtaaatcttaaatgtatagagaaaaaagatacacaaatcatgctgtgttgatcaaaacctcacatatatagtctgggtttagattctcttgtgaatgtatatttgagctatggtgacattaaaaataatcattaaagattgtgttttgcaaattatttcctttcctttaagaagtcaaaccaaataatattgtatgtgtgctggatgagtaaaaaaatagtgatgtattattttggaaggtaaacctttatgtgcattaaatattaagaatagaaaaaaaatttcttttgtcataatttatagactttattcttgaatttatgaatatccaaagatgtctctggcataacaaaaatttgtatttgctaaataataataaataatgtcagaatgaatattaaataataaaacaaaccaaaatatatacaattgcatttgaggaattcaaattaacagaatcaaattgtaacaaagcatttttttgatatcaaaaattgtgagtgaattaataatgaagcagtgacaaaaccaccagcaaataaacaaatgaaggggcatcattttatacaatattctttgaacattcagataaataaataaacagggagtagatgactcagaaaggaggaacacggaaaaaaagaggtctcacatccaactactgtgtatcccagaaagcaggactggcagatcagcaagatcctgagaatactcggtaatgaccacagatttcgtgacaataaaacagagagggtatctattatttcctttttcagattaagaaataatggaaatagtttctaggaagaaactagtgaattaaaaaataaacagcacatcagattccaaaaaatatgtgtaaaggatcaataaacattcaatgaattcaagaaaaatatctgaatatctggctatcaccttactagtttattataaaaacgtgatcatatttcagaagggagcaaagactgatttttccaacaaacaaaattgtatagtactttattacaggtttttgtgcttcatttatcaatattttagatcagtttaccaaaaaaaaaatacatagcaaaaacactcaactctcaaatattaactagaagagaaaacaaatcattcttagataaaacatctgcaaataaccataatctatgaaggaagtataaaggaaaaggtgaaaaagaatattataatgtttaaaatattataatgctgtaatcccagcactttgggaggcccaggcaggtggatcagctgaagtcagaagtttaagaccagcctggccaacatggcgaaaccccgcctctactaaaaatgcagaaggaaattagccgagcgtggtggcatgtgcctgtaatcacagctactagggatgttgagacaggagaatcacttgaacctgggaggcggaggttgcagtgagccgagatcgtgcctcttccctccaggcagggcaacagagtgagactctgtctcaaaaaaataaataaataaaaagttttaaaaaaattaaactttaaggaaaaagactcaaaagaaggacatttttaatgtggtcttaatttttgaaaaataatgaaataactgcaatatagtaaaaaagttttaaggtgaaaataatacacagaataattagattaaagggaaactgtagaactaaggaaataaattttaaaaccaaacaccatttagagaagtaattaatgaatttgaagataaatttgataaagagtgtaaacactactaaatatcaaaacagaactagagaaaaagaatcgtgtttatcacaattaaaacaataagaaattcaaagaaatttgaattacagttaaataaaattacagttacagttaaataaaagcaattacagttaaataaaattaaaaaataagtcaaagataatccaacacaaaacagaccattaaagtaatagaaataaatatgctttcaattatctactattacagcattttcttaagattgagaagaaaaaaatgttcaaatcaaaggacaaattgtgttttagatccctcccccgaaaaaagcattcaagcattcaatacccttcagctttgcattctttagatattttaaaatattatttaaacacatttgaaatgagacaatcaaattaaagagattctaaatttaaaattgcatcataaaagcagtcatattatgagtaattaacaactctaaatgtgtatacctctaataacagagctttttaatacaagaaacaaaacctgataaaactgcccagagaagtagacaaaatcacaaacaagttggagattttaatgcattccttcaataattgatagtacgagtagaccaaaatcagtcagcgtatataaaatgtgagcaaaattaatcaaccagctagaccttactgagaatcttatagcacatgccactaacaacagtagactacaaatttgttttaagtgattacagaacatttaccaagctaggttgttctgggccataataagtctcataaatttaagatgagtcaagtcattcaaattatattatctgtccatatagaaataaaccagaaatccggcctggcacggtggctcaacgcctgtaatcccagcactctgggaggccgaggtgggcggatcacgaggtcaggagatcgagaccatcctggctaacatggtgaaaccccgtctctactaaaagtaccaaaaaaattagccaggcgtggtggcgggcacctgtagtcccagctactcaggaggctgaggcaggagaatggcttgaacccaggaggcggagcttgcagtgggccgagatcacgccactgccctccagcctgggtgaaagttgcaagactccgtctcaaaaaaaaaaaaaaaaaaaaagatagaaataaaccagaaatccatacaagaaatatctctgttcaaagaagaaatcagctgagcacggtggctcatgcctgtaatcccagcactttaggagcccgaggcaggcggatcatgaggtcaggagatcgagaccgtcttggctaagacggtgaaacctgcctctaccgcaaaaaaaaaaaaaaaaaaaaaaaaaaaattagccgggcatggtggcgggcacctgtaatcccagctactcgggaggctgaggcaggagaatcgcttgaacctgggaggtggagcttgcagtgagccgagatcgcgccactgcactctagcctgggcgacagagtgagactccatctcaaaaacaacaacaacaacaacgttgtactccatctgggcgacagagtgagagctgtctctaaaaacaaacaaacaaaaacaaagaagaaatcaaaaggaaaataatagagtattatgtactaaataaaaatgtaaacacagtatattgaaatttgtgggatgccacttaagcagtaattttgaggaaattcatagccttggatacacatattggaaagaatgactcagtttctacagaagaaaagaaagcaagaaagcgagagagaaagagagcaaaagaatgaaagaaagaaagagaaagaaagaaagagaaagaaaagagagagacagagagaaagagagacaaaagaaaggaaaagaaaggaaaagaaaagaaaaaagagcgagctaaggggccaaaaaaacacagaaaattaaagagttcaggtctttgttaaaaatctatgtgatttttttcaggcctggctgtaggtaattctaaaggctttacctggagggtctcacaggaagaagctgcccacctcacacctgacttggtgcacagccagtgcaatgcagtctctgaagggagttgcagtcaaggactcaggtcccttggccaagtatactcttaagcatgtctgtattcctagcctagatgccttaatttggagatctctttatttatggccttacggtgaggccttcctcaggtacccctgcaggaaatttgtttataagggaagaagtggaaaactaggaagatagttttcttcactctgactcagtactcctccacccgtaaaacttcctcctctcctccttcacccacaggtccgcaaaactgcaagagactttcatttgggggtgcctcagccgcgaaatgaactccacatgtgtactcatccacctgaccctccaccagtgggtgcgtttcaagtggggaaaatgaaacagtgtggagcagggctttctccagtttatcctgttgtttatacagaatgagtaaaggaatacatacttggttaaaacgttcgttttggcttggtttcattggtggctggtcttacaccttaaagctcagttcgttccatctttagcagagctcctggtaaaaaatagcatattaaacacaaagtaagtaaaagaaaagaagtaataaagatcagagtagaaatcaatgtaatagtaaacagaaaagcaataggtaaaatgaatgacaccaaaagctgatgctttgaaaatatcaccaaagttgataaacctccagctagactgtttgatcagtgagaaaataaaaaatagaaaaagaaaaaaaattgacagcgtgtgaaaatggccagtatcagaaatgagaggaatgatttcattttagataatacagatatcaaaaggataaaaatggaatattataaataactttatgccaatgaatttgacagtttatataaaagaaacaaatttcttaacacaaactagagaaactacctcaagaacaagaaattcctatgtaacatgaatagccttctatctattaaatatattaaatttctagttaaaatccttctcacatggaaacctctgagcccaaatgtctgcacaagtgcagtgaattttccaaaacatttaaggtagaaatgacgccaattctacacaaactcctccagaaaattaaaaaaaaagacttccaactcatttatgagcccagtattattctaacactaaaattaacaaccagattacaaaaagcaacagaaaaaaagaagattaatattacttttgaaaataaattaagaaattctaaacaatgatttagcaaatgggattcagcaatgtaaaaataataatgcatcatgattgcatcatccaagggaaagctttcccaccacccttttctacaggctcactggaaatgaactgacaatagaaaatctaataggagagaaggcataaagatttatttaatattcataagaatgggggaatatcatgaggattacccaagaactcagtgaagtctagaagtttatatacccattttcataggggaaagaaagacgagaatgtcagagtaaatgattttgggagattctcttcagaaattgaatggactgaggaaacaaacaatggcttgaaacaaagtttgaagtttatttgggctctagatatggtgtttaattttcagtctttctctgtgaagtgagttttaatctctgattaatgaaattttagggaggggatggaaggtaactgtgttgctctttggagatccgcttttgaggtagataaggaaatttctgagaacagatacagaaaattgagagacaggagggaattgaagtgggtcagagagactatcaggctgcttttttagttcagcatatcaaagcaccatatttcagaatttcagaatatcattttctggatcatttcccaacatgatcaggaagaatttatccaaggagtgcaaggctgattagaaagtcaatccatgcaattcattgacttaacaaaaagggggggaaaaacaaaagaaattatctgattaaatttagacaaagcatttctcaaaatccaatactcattcttcataaaatgttttcatgactgatatggtttggctttgtcctccctcaaacctcatcttgaattttagctcccaacattccccacatgttgtgggagggacctggtggtaggtaactgaatcatgggtgttggtcttttccatgctattcttgtgatagtaagtctcacgagatctgatggctttacaaagaggagttcccctgcacaagctcttttgttttgcctgccaccatacatgtaagatgtgacttgctcctccttgacttctgccataattgtgaggtctccccatccatgtggaactgtaagtccattaaacctctttttattttgtctcggatatgtctttatcagcagtgtgaaaatgaaatattacagtaaattggtactaattgactggggtgctgctgaaaggatacctgaaattgtggaagcaactttggaactgggtaacaggcagaggttggaacagtttggagagctcaaaagaagataggaaaatgtgggaaattttggaaattcctagagacgtgttaaatggctttgacaaaaatgttgatagtgatatgaacagtaaggtccaggctaaggtggtctcacacagagatgaagaacttgttgggaattagagcaagggcgacttttgttatattttgtcaaagagactggtggcattttgctcttgccctagagacttgtggaactttgaacttgagagagatgatttatagtatctggcaaaagaaatttggcagcaaagaattcaagaggtacttgggtgttgctaaaggcattcagttttataagggaaacagagcataaaactttggaaaatgcgcagcctgacaataagatagaaaagaaaatcccatttttctgaggagaaattcaggctggttgcagaaatttgcataagcaacaaggaggcaaatgttaatcacaaagacaacggggaaaatgtctccagagcatgtcagagacccttgcggcagccccttccatcacaggcccagagacctggaaggaaaaaatggttttgcgggctggccccagggttcctctgctttgtgcagtctagagacttgctgcactgcatcccagccactccagccgtgatcgaaaggggccattgtagagtttgggccatgacttcacaggacacaagccccaagccttagcagcttcttcgtggtgttaagcctgcaagtgcgcagaagtcataaattggggtttgggaacctccatctagattttggaggatgtacggaaatgcctggatgcccattcagaagtttgctgcaggggcatgaccttcatggagaacctctgctagagcagtgcaaaagggaaatgtggggtcagaacccccatacagagttctcactggagtacccgcctaaaggagctgtaagaagaggtccactgtcttccagaccccagaatggtagatccactgacagtttgtgccatgagcctggaaaagccacagacactcaacgccagcccatgaaagcagccaggagagaggctgtaccttgcaaagccacagggttggaacttcccaagaccatggtaacccacctcttgcatcagtgtgacccagatgtgagacatggagtcaaaggagatcattttggagctttaagatttgactgctccactggattttggacatgcatgggccctgtagcccctttgttttggccaatctcacccatttggaacagctgtatttaaccaatatctgtacccccattgtatcttggaagtaactagcttgctttggattttacaggctcataggtgaaagggacttgtcttagatcagactttggactgtgggcttttgagttaatgctgaaatgagttaagactttgggggactgtcgggaaggcatgattggttttaaaatgtgaggacatgagatttgggaggggccaggggcagaatgatatggtttggctgtgtcccccaccaaatcttatcttgaattgtagttcccaacattcccacatgttgtgagagggacccagggggaggtaactgagtcatgggggagggtctttcctgtgctattcttgtgatagtgaataagtctcacaagatctgatggttttataaagaggagttcccttgcacaactccctctctttttgcctgttgccttccatgtaagatgtgacttgctcctccttgcctcctctgatgattgtgaggcctccccagccatatggaattgtaagttcattaaacctcgttttcttcccactcttgggtatgtctttatcagctgtgtgaaaatggactaatacaacaacttaatataaaagagacttcttcaacatagtaaagataatctatcatagctcaatgactaaaatatatttaataatgaaagaaataagggttatcagtaaaacaggggaacaagaaaagggaggtcactttcactttttcaattcaactttgtactggagatcctagccaggaaaaagagacaagaaaataaaaaaggcaactaaatcaaaaaggaaaaaaaataaagctttctttaaacccatctatacatattttatatgtcagaaattataaataatcttcaatttataaccaaatgtcattatttaaaagtaaagtgcactctcaaagtctcaaatatcacttcatagttctaagtcagatttatttaaaaagtacttataaaaggtattgccttttaatctgaagttaaaagacaatacagagatacccataacatgatttgtttcagaaataatttttaaaatctaccaagcatgagttcagcactttgaaataagaaatgtgttcccatgttttcatattttaaaaatatttctatgaatcttatgtttttatagatattttcatattatgcattataaaaatagttttaattaatcacctgcatttttactgtaatattattctttatagtacagattttattagcagagttagttttgaagcctatcaatgagatctaaatttaagataatattttatagcaaaaaataatctttccatgcattttcaaatttatgactataatgtgtgctttaaggattcttcaatgaagcagaagaaaaagttaagcaagtaatcatctattgtatggataaacagcttcctttaaattgaaaaagatattaacctaggtatttacactactgaacaatacctgtagtaagtaattcacataattatcctggaaatatcattattatatgactaaatatcatgaaaaagccatttttaaaatttggcttaagcaaaagcaaagttttccaactgattgccttattataaagactactcagaatagttgtcaggtagcatgtaatacataaaaacatacagggacaaaaccagcaatgatattataacatcaataaacacattgaaattgaatttcttttgtttgttcctatttcaactcatttggacagacagcatttattttagtatattttgaaggttaatggatctatttttatagtggcattatttatttcttgctgcctggtaaaacactgtaacaacagtgttagattttatttcaataaccttcacctaattgcatttactcatttcaacatttcattttccttttcgaattcactattatctgtaagcatgtaaaacttttgttttaggagaatatgccaaaatattacagaattcgctttttacttcatgaattattaatttgtatatatgcctctttatttgactgaggccagcataaaaggaaaggataagatgttagatttttattcacctgtcttaaaattatcacataagtgtaataattccatagccatcttttctctgttgtttctcattaaaaattttcgatagtgaaaatggtgcctcgtatataatatgaatgaaatatagcctcttgagaatagttcttattttatgtgcttaaaggagatccatatacacttggcccaatcatggagatcccctgaaaaaattttctatatgcataaatggactattactttttctttctttccttccttccttccttccttccttccttccttccttccttccttccttccttccttcctccctccctccctcctttctttcttctttctttctgtctttctttcttctttttctttctctcattctctcattctctatgtctctattctttctttctttcttttttctttttctttctctcattctctatgtctctatctcagtctaaggggatctttcgccacaaggaaggttttttacacctatgctggttggactggcagtaccggagaggtaatcatcccagagtgaccctacattaatgagggaaaaaatttggtgaataaatactctagcatcctcagaaaataaagccacatttttacggcatgttctcttggtatttcagaaagttctcagcagaattgagccccagtatccctttgagatgatatgctcatgagtacctcctttgttggctcctttcttcttctttgtgtttcacttccccacttccctatcacacccgtgttcaccaggattaccttagaaatactacttgtctcaaggtctccctttaggttaatctagactaagactgtacaacgtaaaacaatgcatgttccaggatgtcgtaactagtataatttgagatgcaactatatttgaataggattgattattttgaaatacaaaatacactatttggaaacattttgtttccattcatttatgaatctattcaatcttgaaaatactataaaacacaaaggagcatattttaaatccagtttatatatacaaactaaacaaccataaaaataaatcataaatctcacagtataacactgatacttcaaaaaaaaaaaagaaaaattatctctttatattgaaaacctccagtcttatttgttatttacttaaggtagctagtcttagaatttttggagcaatatacgttgataagatttgagaaactttaaattgaaattgattgcataagaataagaacaaaggtagcaatatatttgagtgcactgagtgcagtacatattgacaaaagctctcctagtctaaaccctggctggcatcctttcagcccagttctcaactagtttttaactttggcctgtaaaaaactacagattctcagcataaatgatccattgcaccagctcccacccctgagagtcttaaacaccagcataatttctaacatctcaaggccgtatacctaagacaaagattgcagcccctttaagttccttcctgggaaatttcagggttgccaaaataatttactgtttgttccagtcaaaacttgaagatagggtcccactgtttcccagtctctgtcagaggattggtccctaactttggtaaatgccagttagcgaacccaggtgacctaatcatgttgttcagtccttctttctgctttttgtgaaattccactccgctaagcccctgcctttccccctctctattttctcattctcccttgaaaatacctggttgcttctgcacaaatccaagttgatttcagttcatgctgaaccctcttccatattggtgtagttattgaataaaatctatcattaccactttaagtagtgtctagttttatctctttcttgtttatttgtttttgaggtggggtctcagtctgtctcctcgactggcgtgcagtggagtgatctcggctcactgcaacctccatattacaggcgcaggtgattctcccacctcagccatctgagtagctgggattacagttgcgcaccaccatgtactgctattttttttttttgtatttttagtagacacggggttttgctatgtttcccaggctggtctcaaactcctgagctcaagcaatctgctttccttggcctcccagagtgctgagattacaggcatgagccaccatgcccagccttggttatatcattgacaatacatcccttatgattttaaatatgctaccttgtctcagattattatttatttgatttattcaattaatatttattatacttactacatatcaataattcttcagagagctggttacaaacaggattcatgttcttaataatgtcatcccagtgcaaaaagagaaaacaagtaagcaaatacaatgttatcactgtttatcaaaaatgttcttgtaggaaagaaaatacagttgtctgtttgggtggtcaagaaatacttctgaggatgtgggatttcacatgtcatgtagaaatgaaaatgtgatagacacggaatttgaggaaatagtgcttggaatacagaagtcggcatcagcaattgaaatgaaactggacagggcccatatgctctaggaactaacaaacaatggtttggctggggcttgtacaaagctataataaaaagaaccaggttaaattcaagatatatgtatagacaagttgtgcaaagaccttcaggttatataaaaaggtttgaatttcattctaagtgtaatgagaaataattagagcatcttaagcagctgaataatgtactctgattacattttaaatagctaactctggctctttgtaaatactgagtttaggcaaatgagaatggaagcaggaagaacaagtagaagataactgaaatagtccagtgtagatgggaatacacaggatctctcccactcccagtaccataaagaatgaagatataatgtcatcagttgagggttacgataaaattaacactgtgtatctgaggttgaaaataaatcagaagtagatatcacagggatgtctctgaaggacttttaggtagtctagtggttgtaattcttactatttatggaatgcagttcactcaccattttatgtatttgtcattgcatgatcacattcctgtgtgtaagagtgacaattacaatatatattaattggtatgacctgggccactaataatcacaatagatggaggctataaagaacgattacagtcatagtggactatagtcttaaaaattccctgtaaacatatagattacattatcattaaatataaagtaaaaatactattacagggtttactactatgtagaacttatatagacaatggtataggatatctgtgtttgaaatatgtacttgcaggaaagtaagacctctgtaattaagctagcaacaatcatgtaattgatagcattagaatgtgtttagtcatacaatatctgcatattttatataacattgcctttaagaaatataaacacaaaaatgaattgattaattatatgttggttaattggttttattacatttaagaggttatgtctatcaaaagtcaccactaagagactgaaggacattgactagaagtccaatcataagacatatatccaacaaagaagacctatacagaagacataattaactatctaaataaagatatattgtctgagcatggtggctcatgtctgtaatcgcagcactttgggaggccaaagcaggaggattgcttgaggtcaggagctcaagaccagcctggccaacatggcaaaacccatctatactgaaaatataaaaatcatccaggtgtggtggtgataccatgatccaggcaggaggcacagaaattctagacagaaaagggcaggtgcctgaaaaagccccacttcaagccaaaaagcctgagactgcagcccaaagtgagaacttacatccctgttttcctgctcgaatgttgacgcttccaaaaccacactgcccatcctttgcctataaaaaccccaggattagctggtagagagagaaaaaaacagctggactatgactggatgttggagaaaagcagcttggcttcagagggacagcctgaaggtataacttttgagaagaatccatcaggagatggctggagttcagtggaaggctatttttctgccttatccctttttcagctctccttcccactgacagccactttcatcagcaacacaaattccctgtgtttactatcctttatttctcctggatgccagacaagagctcgggtgccacaatgtggatagaaaagactgtcacgctttctctttgccctcgctggtggaaggcagccgcctcacgtgaaaaggcagagggcttactgatctgttaacatgtaagccatctgcagagagcagagctaaaagcagtgtaacactccctctgggacttcaggggtcacaggcaccaccccagatgctgccgtggggcctgcatagagtttgttcctgccagcacctaaaagtgctcaccctggctcccgcacccactcacctgcatgctccccgacacgaagggtggaacacagcgggtctgagtgagtggcgttcacccctgccagcactgaagctgccagctagtttcagtgtttgtgcactctggttcccgcttcattcgctcatagtctccctcccccgaataagctggctaagctaggcaccccatctcgagtcctgtgaaggggtcagagaaatatcctgcttcagtggtgtgcatctgcaatcccaggcacttgggaggctgaggcacaagagtcacttgaacctgggaggcagaggttgcagtgaaccaagattgtgccactacactccagcctgggccatagagcaagactctgtctcaaaagtgtacatgtgggaaaccaacaccatattcaagaaagtcaccatatccatcagcccccagatttttctcatgagcctttaaaatactttcctcaaactggttgatagacttcttaaaaagttcttgcttgtttatatatagttttttagttaatttcagatagattgtattgtaatttacaattgcaatttttgatttggaaatttctccttgaagcacaaacagttttaatttatgtatttctgaaattctgttattaggtagtacatatttagagtaattatgtcttcttgaagaactgactccttgatcaatatggaagggttttccttatcattagtactaagatattttctgaaatctatttatctgatattaatatatgcagcattcttttgattagttttatcatggtaacatttcctatgctattgtttttaatctattttggttttatatttaaattgagtttttgtaggaagcattaagttattattttcttatttgatctttcaatctggcaatttaattgtcatgtttagagcacatatatttaatatgattattggtatagtgtttgaaatctatcatcttgatacttattttaaagtgattccttatgttctttctttccttttacctttttccactgtacttttttttttttttcggcttacttgagtatttgtttcagattctattttatccctgttactggcctattactttaacccttacttctgttattttagttgttgctttacggtttataacaaacatcattacttataaaacttaactctcggctgtgtatcgtgactcatggctgtcatcgcacttgggaggccacggtgggtggatcacctgaggtcaggagttcaagaccagcctgaccaacatagagaaaccctgtctccaataaaaatacaaaattagctgggcatggtggtgcatgcctgtaatcccagctattcgggaggctgaggcagaagaatcacttgaacctgggaggtggaggtggcagtgagccgagatcgcaccattgcactccagcctgggcaacaagagtgaaactctgtttcaaaaaaaaatagtcaactctcatttaatatgttgccacttttttttttttttgagacagagtatccctgggttgcccaggctggagtgcagtggcacgatcttgggtcactgaaactttcaccttgtgggttcaagtgattctcctgccttagcctcctgagtagctgggcttacaggcgtgtgccaccacacccagctagtttttgtatttttagtagagatggagtttcaccatgttggccaggctggtctcaaactcctgatctcaggtgatctgcccaccttggcctctcaaagttctgggattataggcgtgagccaccatgcctggcctatgttacctcttaaaatatagcataagactcttaaaatagtatgcttctgtttacctcttatcaggctctgtgctataaaaatttgtttatacacattttatttttcctatattataaagttcagactacattggtatatgttttgtttaaaatgtcagttgttctttttaatattcaaataataagaaataatcttacatagttaccaactgttaccatgttattactcttaattcatttttttcctttaatatttccatctagtttcattttctgtcattttaaggggttccttttcatttctggtgatggttaataatgagtgtcaaatttattggactgaaggatgaaaaggatgaaaattgatccttggtgtgtctgtgagggtgttgccaaaagaggttaacatttgattcagtgggccaggaaaggcagactcaccataatctgggtgggcaccatctaatcaactgacggtgaggcctgaatataaagagggaagaaaacatgaaaaggctagactggcctagcctcccagcctacatctttctcccatgctggatgcttcctgccctcgaacatcagactccaagttctttagtgttgggactcggactggcttccttgctcttcagcttgcagatggcctattgtgggaccttgtgatcaggatttgttctagagaaatggaatattaaggatggaattctttcattggttttggggtttctggagtggctgggacgcagggcactaagtccctagactgcacacatcacagggaccctgggcctggcccataaaaccacttttttctcctaaacctctgggcctgtgatgggaggggctgccacaaaggtctctgatgtgccctggagacatttcccccattgtcttagtgactaacatttggctcctccttactgatgcaaatttctgcagctggcttgtatttctcctcagaaaatgatattttcttttctattgcattgtcagattgcaaattttctgaactttcatgctctgtttcccttttaaaactgaatgcgtttaacagcacccaagccttccaccagaaaccctaaatcatctctctcaagttcaaagttccacaaatctccagagcagggcaaaatgctgccagtctctttgctaaaatacaacaagagtcacctttgctctagttcccaacaagttcctcatctccatctgagaccacttcagcctgaacttcattgtccatttcattatcagcatttttatcaaagccattcaacaagtctctagagagttccaaacttcccctcattttccttcttcttctgagccctccaaactgttccaaactctacctgttacccagttccaaagttgcttccacattttcaggtatcttttcagcagcaccccactctacttgtactaattcactgtattagttcgttttcacactgctgataaagacatacccaaaactgggcaatttacaaaaaaaagaggtttaatggacttacagttcccagtggcttgggaggctttacaatcatggcggaaggtgaaaggcatgtctcacatggcagtagacaagagaagagagcttgtgcagggaagctcccatttaaaaaaaaattctccatttatttaatgtgtttaaccatttatctggatttttgaaactatgcactaaaattataataatgtaattcatgtagttgtattctaattctagcatctgtgtcatatgcagtttggtttcaactggattatttttctctatattttccttctttgattgtccagatagtgtttcttagatgtcagagcttgtgaattttgccttgttacttgcccaatatatttgtatttccatacatattaaattttattcatggatacaattaatttatttgggaatagtttaatcctttggggctttgcctttaagatttgttaggtataaacagggaagtgtttaatctgtagcatgttattacaaatacctgaggcaagaaccttccgagtactgtaaccatactctgtgaattacagtgtttttcagctggttgatgtaaataggatatttccatccatatatgagcatctgatcctgttttttctcctcttttcacctgcttctttcctctggtattttctttaagcacatgtgccaatcagtactctactgaacactaaaggaaaactctgtggtcttcttgagttttttagccgtacaggtctttcctctctactattctgtctttggaactcttggtgagtaggattgcctaactctcagctctgccttcacagttcagggcttatctggggtctgcctgattttccccctccatgaactacaaagtggaaaccctttccaggtggttaaatgaaataatttagggttcaacttgttcatttctacctctcaaatatcgcacctgttgtttaaatgtccaaaactattattttatgtattttctcagtttattttgtttttgttttccatctgggaaagtaaattgggtggcctccttcttatcttagccaaaggtggaaattcctatgacattgtgtcttgacactaaaaacaaaattgtgaattagtagtagagaatcttctaactaatatgagataacatactgctgacctgagttgtattgtgagaacagatgtgtaagaataggaaatctctttgatcatgtttggattgtaggtagaaaacttagatcaagtgaaattgttaaatatgcgatggagcctgatattcaccatagcacacaataaagatgaaacaagtttgtaaaaatgtgaaacacttcagtccagttggcaaatagctgcttcatcaatcttcccccaaatctccagctgacctagctactgagcctctctccccttacctccccaacttcagattctaacaaggttaaccttgcataacaggtattccaggaagctgctttttctctctgcctgggaccaggaacctttccaaattatgatgattgtaccatacttaatgttaaatagtttcctatggcccccatgatgatgctttttgtgttattttattctcaaactcctggagtaactctttatttaaatacttctttaatactttaaataaagtagtatttaaataaagacagtttatctgaattcttcatttaaatacttctttctttagaaaaccaagcatttctaataagcctttctattgagtttaactgtcctccagattttactatttagcctgtttcctgagtcctgtgttgtggtgacacgttcaattgttcatgaaatccagcctgactgaaaatgcaatctgttttctcagttagaaaactataaagaacaagagatcccatgttaatagtgtagggtcaaactttaacatgatgaataaagttagggaaataaatagtaaaccagttaaaattcattttggagctctattattttcacttcttcatttgtttttctacttttctctaacttttctgtccctttatttcccattttaagaaagataagtttcagatatttttattcacttactaaatattactgtgctggcagcagcttaatattacatgtctttaagaaatagttgcattttaatagtagttcttagaaatcagaaattttattgggcccatataaattaattgaaagttgcattccaagaacagtgagaaacaatgagcaaggtgtttaaaaactcattcttggacatatatcttaaattattttacttagatgcagaaaaagaattccacttaattccagggaagtatacagcactagaaatctctttctggaagacaaaattcaatctatgaggttattgcatgttattaataaacataaatctctatataacacagatatccaaaagcattaaaacttcatgaagcttaatcacaactgtgataatgttacttaaagtgttatatttattttatcaatatatccaaatatactgtatatttgattttttgtttattttgcttttgttttacagtttggaattaccattgaagtttacctgatgggtttgtttttctcaaattacaacatgtcaaattgcttttactattatcaattaattaataaatcaatactttgcatgagaagaaataactgaataagaagatattcaaaagccactataagttacgtcaacatttttcatgttttcagttaatttaattttgaccttcaaattgcaaggaaaattccactgaagttttgaaatttgaaattaaactagtaaaacccagcatattttgcatttgttggattcttaaaactatgtgtcctttgaaagtgtaaattcaacacagcgtttgaagtttcagacatttttgtagtcatttcaaacatattgtcgaccatataaaaggttatgctttgcccttagtccatgcacagagaattctgattgatgtcaatgggagccatgtgcaaagtttgcgggcactgtagtttgaaactttatggtgttttcagaatatctttgaagtctagtttctgtgaaaaatataaagtttaaagagtagctcttcagggcttattcttatccacagagaacatgtttagattgcctgttttaaatgccgagctaagctgaaatttcaaaaatctagtatgcgtttggagtggttgattacaagagaattattcaattgagttcaattgctagacttggagacaatggtggcaaatctatgttggtaatctatctttttatacatttgattctgctacaatagtgaaaggtataaattgctgttcaatttaatgctaaaattaactatattgctaccattaattttttatttaagtatcttcaacaaagcaagtagaatcacttttgcattgacaaattcaatagcgtttgatttttgcattattactgaggaaagatattaattggtaacaatgctctattattaattaaagtttatttttgcaaatatgttccaatgaaaagtatttaaggctaagttaaggaaggataatttaaaccaatttcctaaaattcataatattttcttaggcttgcagactgtggaataaaatgcatattatatagaaaaaattttatcagaaagaaattattatgttataaaagttattcaacatatttttctatttaaagacacaactgtcattttcaaaatcaaattcactaaaaggtattatgttttctaaagaccacggtttccattttgcagtataattaatttgtgcttaaaattaatgaaatctgtgagttttttctaaagcattctttatagttctggtacctaagaataatttgcacaatgcaggcttaatgtccttgataggtcatcctacatgagcctaataatccatctcactgtaactggaagaaagtgctaaagcaacactcaagaaaagagattcatttggatgaaaacgaaagcacaggaaataaacattcagctaggaaataaacatcatggtggggttttagatttgactagaattcatgaagtccttgcccatgcctatgtcctgaatggtaacgcctaggttttcttctagggtttttatggttttaggtctaacatttaagtctttaatccatcttgaattgatttttgtataaggtgtaaggaaaggatccagtttcagctttctacatatggctagccagttttcccagcaccatttattaaatagggaatcctttccccattgcttgtttttctcaggtttgtcaaagatcagatagttgtagatatacggcattatttctgagggctctgttctgttccattgatctatatctctgttttggtatcataccatgctgttttggttactgtagccttgtagtatagtttgaagtcaggtagtgtgatgcctccagctttgttcttttggcttaaaccccaaaagcaatggcaacagaagccaaaattgacaaatgggatctcattaaactaaagagcttctgcacagcaaaagaaactaccatcagagtgaacaggcaacccacaaaatgggagaaaattttcacaacctactcatctgacaaagggctaatatccagaatctacaatgaactcaaacaaatttacaagaaaaaaacaaacaaccccatcaaaaaatgggcaaaggacatgaacagacacttctcaaaagaagacatttatgcagccaaaaaacacatgaaaaaatgctcaccatcactggccatcagagaaatgcaaatcaaaaccacaatgagatatcatctcacaccagttagaatggtgatcattaaaaagtcaggaaacaacaggtgctggagaggatgtggagaaataggaacacttttacactgttggtgggactgtaaactagttcaaccattgtggaagtcagtgtggcaattcctcagggatctagaactagaaataccatttgacccagccatcccattactgggtatatacccaaaggactataaatcatgctgctataaagacacatgcacatgtatgtttattgcggcactattcacaatagcaaagacttggaaccaacccaaatgtccaacaatgatagactgaattaagaaaatgtggcacgtatacaccatggaatactatgcagccataaaaaatgatgagttcatgtcctttgtagggacatggatgaaattggaaatcatcattctcagtaaactatcacaagaacaaaaaaccaaacactgcatattctcactcataggtgggaattgaacaatgagatcacatggacacaggaaggggaacatcacactctggggactgttgcggggtggcgggcggggagagggatagcattgggagatatacctaatgctagatgacgagttagtgggtgcagcacaccagcatggcacatgtatacatatgtaactaacctgcacattgtgcacatgtaccctaaaacttaaagtataaaaaaaaaaaaagatttgactagaattcccttttaagacaacttaacaacataaaacagggagaagtttaaaaaataaaaatacaataaagatatatttgggttacttttcactgttgtataccatagaaaatcagattttctgctgtctcaacaatactttcaatcggttattgataactgagtaaataattgctgtacaagactgtcgatctcaggctgggcatggtggcttatggctgtaatccagcactttgttaggccaaggtgggagcatcactgaggccaagagttcaagaccagcctgggcaatatagcaagatcctctatattaaaagatcacaaatctttattttcttcaatgcagactctctactgcagactctctacgtagccatttgtacaccacgtatttccagataatcagtctgtcttcactcccattatccaattacttccatagtatacatttccaggggagatagtttcctcaactcatgagaattttgaattatatcaactcctaagaccatgagaatctattctcccacagtaactcctcataaaggtattcttttatatcccctttttcgagataccaatgaacgtatcttcaatttcgtgtattttttttctttaaatcatttagagccattgacttcaagctaccttttttttctgctctataaacattatcagaatcaagaaagtacaacatcctggctatattcttataatttaaggagtactgggaaaaacagagagaataacaaacatttttgtctcaaataatccgtacaaagaaaagcaaagtgatggatccaattcagatacagagaaaaagctaaccctttgaattaaaaaatttccagtctcatgttttgttaataacaagagttacatcagaaagtgaaaagtgaatttgagaataaaatttgaaagcactacacataaaaattaggtaccagtgaaaacagtagtgaacaactattgtgatgtactattatttcatcacatttttttttttgagacagggtctcactctgtggcctaggctggagtgcaatggtgtaatcatggctcactgcagcctcaacttcctagactcaaggtgattctcccagctcactctcccaagtagctgggaccacaagcacatgcccacctaattttttgtattttaatagacacagggttttgccatgttgcccaggctggttttgaactcctggactcaagcaatctgtccccctcggcctcccaaaatgccaggattacagataagagccaccactccaggcctcatcacatttttaattgcgtacacagtagtgatactccctcaccctcaattctgttttttttcatttttataaaatacgcaactacacacaccagagactatcttaacaaacacatttctggcctgtgttgtcacatagagtaagtgcaatagtttgaatgtcatcaccaaaattcttgttgaaattaattgtcaatgcaacagtattgggaggtagggcctttatgaggtgattaatgatttatgccatgaacgcattaattatcactagagtaggtcagttattgtgagattgggttagttataaaaatgtgttccatctgattttttttctttccatctcacatgctcacttctgccttctactcttctcccgtaagataaccttgcctgatatcattgccatctctttaacttccagtctctagaaccatgagctgaataaacttcttcttcattaaataaattactcagtctttggtattctgtcatagcaacagaaaacaaactagtatattaagaataccatgaatggtagcataatctggatcaatattatccaaagtaagtaaggtcaagtcaggttaaaagtaccataggactgtggaaataaacaaagaccaaccaaatgacaataagtaaagactatgtatttgaatcttgccgtacaaagtgagtcagccacagccacttgcattttggtaaagactcaacatcaagcagaggaatggcaaagcttcatagtggaaacatgaaggccttccctgattggagactattagcatgaaagagctgtgagtggggtaattagaagccagacattatttgtgattgattaggggtacatagttgcctttccctatctctcaagttgctttggtcatacattgaaaatggggacaaaaatttagaaaattgtcaagtcctggccattttgggtacagaagttatggtttagctttctggaccagtaactagagataacagtaagactacagttctgatttatagatagcagaccatcttcctgggttgctttctgtagacaatgggttggtcccttgggcagattcctgcccagattgtggaccagagttagttctatttttaaatatggtgcctagccattgtctgtttctatatccactctccctagatattgacattagtggttctgtcttgtgctttcctggttctataatgcttacaataaaacattgtgtttttaaagagagagaaagcttgtcactcattcattctgccagtatatttgaggaagtattattttctatacaaaaatctaggtttctgttacaaacattactaagagagtcaacctagcctcttgactaagtacatggttccaggtccagattgtcactccctgagtgatcttcaaaaattcatgtaacatccagtcccacaggtttttcattgaataaatggggtgatcagtagctacttcacagtgttgtcaagaagtaaacaaattaatacctcaaagccttcagaatgttgtacagcacattagaagtgctcttattatttagaaaagatggtgtatagcttagaggaatggatcctagaatgggagtaaagaactttttgccacagtaaccataactttgtccctctgaaaaaaaatgacaatgatcacaggattggcttcataataaatataaaaatctatagtttctcaggggcatacatgtaataccagcattgtgggaggctgaggcaggcagattcttgagccaaggagtttgagacaagcctgggcaacatggcaaaaccttgtctccacaaaaaagtacaaaaattggccaggtgtggtggtacatgcccgtagtctcacctatttgggatgctgaggtgggaagatcacttgaacctgggaggttgaggcttcagtgagctgtaatcacaccactgtactccagtctgggcaacagagctagactttgtctaagaataataaaagataaaataaaatttctcagggagtgtgtgggagggaggggagggatgaaaaattacttattttatacaatgtacaccattcagatgatgggtactctgaaagtccagactttatcactatacaattaatccatttaagcaaaaaccagttgtacctctaaagctattgaagtaaaaaaaaaaaagtttgaagtttcttataactatagcatttcaaagttctgactttgtgttcatatatctaactttgctatcagaaatctagaccaaagaaatggaatctttagcacagataaatagatgtagttatgtatgaataaatataaatcttctttgagattgagcatgaacaatttctaagaacaacagaacaagttttagatatattttctggtaatgctcttgggttgtgttatttggtttcaattgctctaaccaccatgactcagaccagatgctcttaatcctgtctgagatcccaaacttaaaaataaatttggcagctaaaattctctctgagttttcagtagttgttggctttattttttagttcagtaataagccaaaaagaaaaatgaagatgtaataaatctagggaaattcacctctaaaagggcaccaactgagtacaggcagtttactgaaaaattttaaattaacaatatacacaataaatacataaaaatggacaagtataagagtatctactatatttccaatgaaagcagagcataactgcttccacttataagtgagaacatgtgttgtttggttttctgttcctgcattagtttgctgaggataatggcttccagcttcatccatgtccctgcaagggacatgatctcattttttatggctgcatagtattccatagtgtatatgtaccacattttcttcatcaagtctatcattaatggatgtttgggcttattctgtctttgctattgtgagtattgctgcagtgaacacgtgtgcatgtatctctgtaatagaatgatttacattcctttgggtatacactcagtaatgggattgctgggtcaaattgtatttctggttctacatctttgaggaatcaccacaccatcttccacaataattaaactaatttacattcccaccaaaagtgtaaaagcattcctattttatgcaacgtcaccagcatctgttgtttcttgactttttaaaaattgccattctgactggcgtgagatggtatctcattgcggttttgaattgtgtttctctaataatcagtgatgattggctttttttcgtatgtttgttggctgaatgaatgtcttctttcaagaagtgtctgttcatgtcatttgcccactttttgatgcacttgtttgttcagatggttgtagatgtttggtcttatttctaaattctctattctgttccattggtctatgtgtctgtttttgtacaagtaccatgttcttttgtttactgtagctttgtagtatagtttgaagtcaggtagtgtgatgtctcccagtttgttctttttgcttaggattatcttggctatattaactcttttttgttccataatgattttaaaatcgtttcttctatttctgtgtagaatgtcaatgcaatttaaggagactataattgaatctgtaaattactttgggcagtatagccattttcacaatattgattattcatatctgtgaacatggaatgtttttccatttgtttgtgtcctctctgatttccttgagcagtggtttgtaggtctacttaaagagatcttttacttcccttgttagttgtattcctaggtattttattctctttgtagacgttgtgaatggcagtctacatgaatgttaattcatgatttggatctctgcttctctgttgttgctgtataggattgcttgtgacttttgcacattgattttgtatcctgagactttgctgaagttgcttatcaacttcagaagcctttgtgctgggatgatggggttttctagatacaagatcgtatcatctgcaaacaaagacaatttgacttcctctcttcctatttgaatactctttctttctttctcttgccttattgccctggctagaacttccaatatgatgttgaataggagtggtgagagagggcattcttgtcttgtgtgagttttcaaggggaatacttccagtttttgcccattcagtatgatattggctgtgggtttgtcatatatggctcttattattttgaggtatgttccttcaatacctagtttattgagagtttttaacatgaagggatgttgaattttattgaaggccttttctgcatctattgagaaaattctgtggtttttgtcattggttctgtttatgtgatggattacatttattgacttgcatatattgaaccagccttgcatcccagggatgaagccaacttgattgtggtggataagctttttgatgtgctgctggatttggtttgccaatattttattgaggatttttgcattgatgttcatcagggatattggcctgaaattttctttgtttgttatatttctgccaggcttttgtatcaggatgatgttggcctcatgaaatgagttaggaaggaggtcctcctttctaattgttttgaatagtttcagaagaaagggtatcagctccacttcatatctctggtagaattcagctgtaaatccatctggtcctgggctttctttggttggtaggctatttattactgtatcaatttcagaacttgttattggtctattcagggattcaacttctacctggttcagtcttgggagggtatatgtgtccaggaatttatccatttcttccagattttctcatttatttgcatacaggtgtttacagtattctctgatggttttttatatttctttggggtcagtgatgatgtcccctttattatttttcattgtgtctatttgattcttctctcttttcttctttattagtctagctagcagtctatctattttattaattttttcaaaagaaaaaagctcctggatttattaatttttgaagggctttttgtgtctctatctcctctagttctgctctgagcctggttacttcttgtcttctgctaggtttggagtttgtttgctcttggttctcaagttccttcagtttcgatgttaggatgttgacttgagatctttctatctttttttgatgtgggcatttagtgctataaatttccccttaacactgctttagctgcgtcccagagattctggtatgttgtgtggcattttcttgatttctgccttaatttcattattgacctgagtcatccaggagcaggttgtttaatttccatgtagttgtgtggttttcagtgagcttttgagttctaatttgattgtattgtgtcttagagactgtgtgttatgatttcagttcttttgcatttgctgagaaatttacttccaattatatgatcaatttcagagtaaatgccatgttctgctgagaagaatgtatattatgttgttttgtggtggagaattctgtaggtatatatcaggtccacttgatccagggctgagtttaagtcctgaatgtatttgttaactttctgtcttgatgatctgtctaatattgacagtgtggtgtgttaaagtctcccactactattgtgtggagtctaagactcttcgtaggtctctatgaacttgtttcatgaatctgggtgctcctgtattgggtgcatatatgtttaggatagctctcctggtttaattgacctcattaccattatgtaatgctcatctttgtcttttttgatctttgttggtttaaagcctgttttgtcagaaactaggattgcaactcctatcttttttctgttttccatttgtttggtaaattttcccccatccctttattttgagtctatatgtgtctttgcatttgagataggtctcttgaatacagcacactgatggatcttgactttttatccagcttgccatctgcaccttttaattggggcatttagctcctttacattaaaaggttaatattgttatgtgttaatttgattctgtcatcaggatgctagctggttattttgcaaacttgttcacatacttgcttcatagcgctattggtctgtgtacttcattgtgtttttgcagtggctgataatgttattttcctttccatatttagtgcttccttcaggaactcttgcaagacaggcctggtggtgacaaattctttcaaaatttgcttgtctgaaaaagatcttatttctccttctcttatgaagctcagtttggccagatatgaaattctaggttggaaattattttatttatgaatattgaatattggaccctaatttcttctggcttgtagggtttcctctgagaggtctgctgtaagtctgatgggcttccccttataggtgacctggcttttctctctggctgcccttaacatattttccttcatttcaaccttggagaatctgacagttatgtgtattggggttgatcttctggtggaggatcttattgggggttctctggatttcctgaatttgaatgctggcctgtcttgacaggttggggaagtcctcctggatgatatcttgaagtgtgttttccaacttggttctgttctccccacctcaatctttattagaaaaaaattatggatacacaacagatgtatacatttttggagtacacgtgaacggtttatacaagcttacaatgtgtaatgatcaaatctgagtaattaggatatcattaacttcaaacatttattatttctttttgttcggaacctccaaatcatctcttcttgctattttgaaatatatagtaaattattgtgtactatggtggccttattgtgctatcaaactttatatcttattccttctatctaactgtatttttaaccaattaaccagctcctctccattttcttccccacactacccattctggcctctggtaatgaccattctatccactacctccatgagatttttttttttttttttagttctcacatatgagcgagaacatgagatccatacttggcttatttaactttacataatatctttcaatatcatctatgttgcttcagatgatagacttttatccttttatggctgaataatatttgattgtatgtatatgccacgtattctttatccattcatctactggtggacacttaggttgttaccatatcttggctattttgaacagtgctataataaatatgggaatgcagatatcaccttgttatacaaattttatttctgtttgatgcatacccagcagtgagcttgctggaccatacagtagttctctttttagttcttttgagaaacctctatgtttttcatagtgactatactaattttcattttcactaacagcatacaagtgttcccccttctccacactctcaccagcatttattattatttgcctttttgatggtagccattttaaatggagtgatacgatatgtcactgtagttttgatttgcatttttctgatgattaatgatattggacaattttcagatatctgttggccatttgtgtgtaaacttttaaaatgtctatttagatcttttgctcatttttaaattggactatctgtatttttgctattgagttgtttgagtttgtcatgtactctgagtattagcctcttgtgagaaaaatagtttgcaaacaatttcttccattctgtatgttgtctcttcaccttcttgtttgctttgctgtgcagaagctttttagcttgatgtaatattgtcaatttttgctttgcttgcctgcacttttgaggttacgctcaataaatcttcccctaatcaatgtcctaaagcatttctcctgtgttttcttctaatagtttcacagcttcagattttacatttaaatctttaatctattttgatttaatttttatatacggagagagataggggtcttgtttcattcttctggacataattatccagttttcctaggaccacttattgaagagactcttctttccccaagatgtgttcttagtgcctttgttgaaaatgtgttgactgtaatgcatggatttatttctgggctctctactttgttccattggtcactgtgtctgtttttatgcaactattatgttatttggattactatagctttgtagtgtaatttgaagttagatagtatgtgatgcctccaagtttgttctttttggtcagaattgtgttagctattcggagccttttaagattccatatacattccaggatttttttttttctgtgaagaatatcattgttatgctgatggggattaggcattttaaatgcatttttgacttaatattttcaatttgtgatgcgtttattgggatataattccatgttagttgaggagcgtatttacatatgtgtgtatgtgtatacacacacatataatctcgagttatttcatcagcctatatgtctctaatcttacagcacatataaattgttacagatatttttgttgtcctcatgtattttatataccattcacatgcttttacccattgtcttcagttaacatctcatagagcactgatgctgtctcttcatttttgtgtgtgtagaactctgtctttagtaagtaaacatttttgaccaggcacttaaagttttgattaaacatattaatttatccatgctcatttctattttatagcacgttattaatttaaaaattaagtcaactgggctttaacacttaaagatatctcaacagaagccaaaggtactaaacatcaaaaaacaagaaatgatttttttttgtaacattttaacttatattttaactttcagtcacaattgggagacttatgaccttttagggttttccaaatcatctaagaaacagtgatttcaaataagtttcatctgtgatcctgcccagcagaacgatgtgggtaatttaaaaattacatgccatgatcaatctgccaagagtttcctctattacattcactgacatttccacagtgcacagacacatttgtaagagaactttgtacaatgaaatgaattagattaatggaagagaagaggagtcctaaatccatataggcatattttgttgaaacaatttctgcaagttcttttgacagaaggaattcttctttaaatgtcatactgaaaactacaaaaacagacttgtcctgattctgagtatactcacaagagtgtttcactcatccactcttagaaaacatttaataatcaattgtagtacattaaattctatttgtatgatatgaaatttaagagagatattagaaaaacatgcctaatcaaacatttattttattggttttaacactacaccaaacacatttctattttactaataaaaatttttattcaaagacatttttctcagatacagggatatgtaattatattacagaaataagtctgattgatagattcagaaatgtttaaatggaagaaaaccaataatctctcatgtaacttgcctgtggtatagagctagttatgccaagactagttataagatggttttataattttacatttttattttatactatttcttatatttatttatgaagggataattcttctgccttcagtttagtttaaaccttgttttgcttatgacatataatacagtgttatctctaaatgatttactgatttgtctttttaaaaatatttctaacctttatataagaaacaaaaataaatatacatgtaaaatgaagcactttgaatcacatttttgtcattaatattagaattataataatatttaatagtggtttatatgagctaatatgaatattcaaaaaatggactgactcatgctacacactcactaattgctagatctggacttatttttttgctgttgctgttttatgctgctgttgttttatcactattttattgttgtagtcgttgctgtaaaacaaagtaatacataaaaataagatgaacgtgaccttagatccagcttaacatttaattatctgacctaaacaaattgctcaacttttgtaggaatcaatttctgtcatgtatgatacaaaaaacctggagtatataacttgtaacaaaatatcctatgataaataactgtatttcccataggtcattattttaaagagtttacttgacaatattttgaaagttgagtatatacctcatgaggtacaggtacatataacctcaaatacaaagaaaaaatactacaaaaataaacattaaataaaacatttactaaaaataaaaattactaaatgctgtgacaaaatttcatcggtgagtattttcacttgtttgaaaattatagcttctgaattgcatagtttggtagccatgttggacaacaaaagaataagcctattttagattatcattttgtaacatgttttaatgagactgcctctcatatttggaaaaaaatgtagaaaatatttctggtcaataatgttacactttaattccttggagcatactttgctattaggtctatatatttacaacaggacacaattacaatgccagttaatgctattactattttcaaataatataccattcttcatccataaaatctatttgtgttttttagctttattgaagtataataatatattaaaaaatttcacccatttaacttattcatgttgatgtttggacatgttttctgttttttttaggtttggcaaaaaaacgtattactttactgaggtataatttatatccaaaaacctttacatttttaatttatacaatttaaatatgaatctgaagttacgtatgttctgtatttaaatattactaattatttgaaaacaaaaaaagtcacaaactttacatagcaaagttcagctgaacaattttcttaagaagaaatatatatgagtaaaaaaatcagacaaaaaactgcttctaacaattcacatgtagtgtatggtggaaagctctatagattgtcttcacataaaatgctttaaaattataaaagccaaaataatgtcccttcattacatcacagacttgtatatttctacgtattcctgtatttacttttcaccacctgaatgtgctgaagtgtcaatatgtcatcattatgttttacaagcaaattggccctttcaaaatcattggtctctgtgtactaatgacaattataagttcttattttgtttatatatctatttacatgttaataatgagctatgataatatttctcttttcccctgttgtatagtaaaatataaactatttagggcctggtgaagtagctcatgcctgaaatcccagcaatttgggagatcaatgagtggggattccttgagctcacgagtttgagatcagctggggcaacatggtgaaactccatctttacgagaaaaaaagcaaaaattagcttggtgtggtggtgcacacctgtagtcccagctgctccagaagcagaagtggaagaatcctttgtgccagggaggaagagattgtagtgagccaagatgcctgggtgacagagtgagaccctgtctcagaaaaacaaacaaacaaaacctagttaggattgtttactttttcccaagcaaaattatttatttattatttatttatttatttatttttataaatttagggaatataattgcagttttgttacataaatttattgtgcagtgttgaagtctgggctcttaatcatcacctgaatagtgtacattttaccaattgggtaatttctcatccctcacctcctcctacccttccacctttctgagtctccaatgtgtattattctactctctgtatccacatgtacatagtaattggtttatttgagattattgctttctttgctattacccatgcacattctacatttacctcttcacatcagataatctcctatttctattttataaaaatactgaatgtatgaagaaatacaggacttttatcttagtccagtatttctcccaaaactgtaaacattaagtatacagtctgaatattaaaattaagtaaatggacacagaaagattcttaaaagttcaataaagatcacatattcaagtaattaacaaagaaaaatgattgcatacacataaaagcaagtagaatatatgttttaaattttttgagttttacttactcagttttatatatgctgacagtgaaacacataattcctagttttcagtagaaaaaataaagaaagaaaggcatgtgggagtatgattattattagaaattaatatagcagctgccatgcataccaaggcattcctcaataatattgtcctcaggtcaagacttgctctttgtcatatgacaatacttatttcttctagaaacaggggaaatattattgtcttattaggtcataataggggtagcaaggcttgtttcaagaaataatatatctaaataacatcttaggagggaacaaatatataaattattatcttcattgtttacattctactctaaagcaagataattctttccattgttttgcaattagaaaaacaaaattattgtcaatacttactttttttttttttttttttgagaggagtctcactctctcacccaggctggagtgcaatggcacaactttggcttactgcaacctccgtctcccaggttcaagctattctcctgcctcagccttctgagtagctgggactacaagcgtgcaccactatgcccggctaatttttccatatttagtagagacggggtttcaccatcttgaccaggctgatctcaaactcctgacctcaagcaatctgcccacctcagcctcccaaagtgctgggattacaggtgtgagccatggcgcctggccatcaatacttcttaatgggaagaatctataatcaaattgtatcaataaagcttgaacctgaatagctgaaacatttttcctgtttctttgttacaaaactgaataatgcatgaaatcaaaagggatcttttgagttgttttgaaataattttgaaatacttgtgggtagtatatgacaattattattagatttagaagaaaactaaagaatgttgaataaacaattaatattttcctttaaaatttttgagcattgaaatctttgccataaaaatggaatcaagaaacaaattaagatcttagcaaacaaccagcactttcccctgagatttggtcaaggcttctcttaaaacgcaataataatcaagtgagtaactagggcaatattttgattacaattcaaaataaattgtaatcatggaaatagactgtttcctgacagaaaattgttcagagcagtacagactataatcattacagttctctagacaaaacaaaaagagatagatagatattggagagagacagagagagaaagggagtttattatgggaattgactcacaccattatggaggctgagaaattccatgatatgtcacctgcaaactgtagagccaggaaagttggtagtataatttatctgagtctaaaggcctggtaacctagaaggctgctgatttaagccccagagtccaagaccagaaaaccaggagttctgatgtctaagggaggaagaatacaaatagctccagaagagagaaaaaattcacccttcccctgcttttttgtttgatccagtccctcagtggactaggtcatgctcctccacactgataagggtagatccttcttactcagtccatgattcaaatgttaatctcttgtggaaatgccctcactgggatacccagaaataattttttatcagctgtctggatatcccttaacccggttaagttgacatttaaaattaaccactacagggatgtcagctaaagaaccgtatcatcttgccaaaagtcctcaaatattaaagccatggctctggaattttctaaggatctaaggattcaaattttaaaagtatgttttacatatataaatgctatttactgtagccagtttaccaagtgaggtccaatgtatgataccttaaaattgcatgtttacatagccataggtatatttcaaggtgtatgatatagtgtggctctgtgttcccacctaaatctcatctcaaattgtaatccccaggtgtcaaaggaggggcctagtgggaggtgattgaatcatgggacagtttcccccatgctgttctcatgttagtaactgagttctcacaagacctggtgcttggcagttccccaccaaccccaccctcctgctgccatgtaagacatgcctcacttccccttcaccttctgccataattgtaagttctctgaggcctccccagcattgtggaactgtgagtcaattaaacctcttttcttcataaattacccagtctcgggtagttgtttatagcattacgaaaatggactaatacagaaaattggtaccaggaaagtggggcactgccaaaaagataactgaaaatgtaaaagtgactttggaaccgggtaagaggcagaagttggaacaatttagagggctcagaagaagacaggaaaatgtgggaaagtctggaacttcctagagaatcggagggctcagaaaacaggaagatgtgggaaggtttgaaacttcctagagacttactacatggctttgaccaagatgctgacagtgatatggacaatgcagtccaggctgaggtggtctcagatgaaaatgaggaacttactgggaactggagcaaaggtcactcttaactatgtttacactttgtccctgccctagagatctgtggaactttgaacacgagagagatgatttagggtatctgggagaaaaaattttgaagctgcaaagcattcattcaagaagttccctgactgttcctagcagtgtacagtcaaatgcattcacaaggatggtctgaaattggaacatgtttaaaagggatgcagagcataaaagtttggaaagtttgcagcttgaccatgtggtagaaaagaaaaccccattttctggggagaaattcaagttgactgcagaaatttgcagaagtaaagagaagcagaatacaaagacaatggggaaaatgcctccaaggcatgacgcagacctgcacagcagcccctcccatcacagacccacattttctgtgttattaataccctattcaaagttcataaaagctaactaaatcttctttaatcgtccacttaattctgaaatataatttagaaatagttgagagttagctgtacatctgtataccaatcctatatatactttgtatgcactaatatataaagtatatgactgtctgtagagatagatagaatatgtaatcattacttgatgttctactacctgccagctggcatgactagcaagagatagttttatattacttttacattttttattccaatgagaacttgataataaagacaaccaaatagtcattacatagatgcaaacaagcataataacttctctagtaatctttctttattttggtgttacagtttattttatgtaccttcccataattgtagtctgttttatatttaatttttcttctatgcctcttaattacacgagtctcttggaatacaattttagtcctataaaaattctcttcaaattattacctaataaaaggaggtttgaagtgtgtgcagtcagaagaatgtgaagccataagcagaagaaggaagtcctatttttaagttaaaaaagtctatgtatttttgacaaatatttcaaattagtttcatccttggtaatttgggatgtatttataatatccatggaaatattcgtaagtatatcacttaagttacattttattttattttagattggaactaatacaatattaccataatctgtttaagattcctataaataaattatattcctataatttataggaatacttatggaatataattaattcctataaataaattatattcctataatttataggaatacttatgggaatataatttattcctataaataaatacaataattatttatagattattataaataaattatattttatgtaatttattaaaattatagaaatgtcctataaataaatacaataacatagattcctataaataaattatattatatataatttattaaattcataagaatttcctataaataaatacaataattattgtattgtattagattggaactaatacaatattaccataatctgtttaagattcctataaataaatagtatgtgactgataagtgatattaactcgttatcatatgcaacccataaatgtacggatgtctaattaacatatttacagtcataatcttctctgtattagataaaaattaaaaaatctaatttttgattgtcaaggtaacaaccagaaaagtaacagaaataatgcataaatacattgccaataacatattctttgtattttactttgtatttgtgcttacatgaaaattaaaataaacatgttatattaatagttataaattacatttttgttgtaactgaagtattgatttcttttatctcttaaaattaaaaaaaaagacagtttaatgcctccatacatgtctttcattcacagatattggtataacttctcaaaaatgtaaacatgcagacagaggagaggaaactgtaaaacatactcatcacaagtaatcactactcattatctaagcattttctttttctcagaaatatctttaatccagctttataaaaatgacattgattatattataaaatgatattgatagtgattttatttgttaaactctaatagctaaaatagagtttaaaaattgtaaaaatcagtactaagcaaattgtttaattaaggtaatttgttctgaaaatacattctttgtgatgattatttttctaattattgcctagatctatgttgtttaatagaaccttttttttactatataaatacaaatttatacttagaatagctaaatagtaagaactctaaagtcatggccttcaaatatacttaatacattttgccatgcatattaaaaatactaaaacatactgtaaaatattttgtattttattttagtggatagttatataacccaaaaggaataaggtaagctataatggatttgtctgtaagtgctggaaggatttttatctgaagctgctggtattataagaaaagaacttttatgtgtgttatctcatgaagtttatataaaagaataaaacatagattgaagtaaataccactgtaaacaaaagaggatcctttcaacttagaattcttatcaaaatatatgagtacactaaggaaactaaaaagtaaaaactacatgtatttatgaaggttcaagttctttaaattttgaatttttgaatggtatactatagatacaaaccaaagaacaaaaactaaaattaccatttgaaccatcaatttcatttctgcgtatatatccgaaggaaaagaaatttaaaaattaattagaaattaattagaaaaaattaatctaccaaaggaaaacaaaacaaaacaaaacaaaacacttgcattcatatgtttacttcagcactattcacaatagcaaagacatggaatcaacataggtattcatcaacggttgattggataaagaaaatgtggtacatacacaccatagaatactacacagccataaaaaaggacaagatcatattctttgcagcaacatggatcaacttgaggctattatcctaagtgaattaactcagaaataaaaagttaaagacttcatgttctcacttagatgtggaagctaagcattgggtagacatgaacataaggatagaaacaatgaacactggggactccaaaaggagggggagatggcagagggcaagagttgaaaaactacctcttgggcactatgttcatcatttaggtgacaggttcagtggaagcccaaacctcagcttcacacaacatatccatgtaacaaacctgcacaagtaccctctgaaatcaatattttaaaaatcaacaatttttaaaaagtagattcttacataaatgacatacagaaaatacctactacaagtattgattaataagtgattaaaatggtctaatggtaagtgtgaaattgtggatgggattagataggcatagcagaggaaagtaagaaaagaagagaagctataataaagcttaaaataattaattagttattggttaattagatacagtggataaagaggaagaataagtcaaaatataactatgtattttataggggaggcaattttgagaagcatattgtcatgctttagtttaaggagattatgaagaggctctagattaaagcataaggtgatcaggtcatttgcatccatattaaactccggttaataacagaaagtgagcataaaaacaatcagtgggaaaatgaaaaaatgaagaaaaagcctacttgttgtgggggcaatgggaccattaataaaaatatcaagataaatgccaataaaatgagaaatactcatgtgagagcaagacttgaagaacgcagaaacagaaggatcatgttttattgctcccaatgcttctgacatgaatgaaaggaaatcaaaacacaaagatccaacacattaagtaacacattataagctagaaatagaataagggaaagttatatacttactgttagactaaaaatgttcattttgaaattagcactaattgcttgttaaaaatgccaactcataaaatgtgacataatgtaaaatatcagtttcttaaaaaatctgagaaataactatgcattatatttgcattgcatgttgggaaaacctgctcattctattctgattttcaattttctttgatttttattattttttaaagagacacacaaaattagattgtgaatagactcctatatacatgctagaacttggtaactaccaacattttgcagaacatgtttcatcttagcctcagtcctcttttatttttctgaatattttaatgatactacattatttcatgtctacatattttgtaatggattttaaaaatacaatttcttggtggggcgcggtggctcacatctgtaatcccagcactttgggagaacgaagtgggcaaatcatgagatcaggagttcaagaccagcctgaccaatatggtgaaaccccgtttctactaaaaatacaaaaattagcctggtgtggtggtgtgcacctgtaatcccagctacttgggaatctgaggcaggagaatcacttgaacctgggaggtggaggttgcagtgagctgagatggcaccactgtactccagcctgggcaacatagtgagtgagactctgtctttaaaaaaaaaaaaaaaaaaaaaaaaagaaaaaacagtttcttataaaaccttagtaactctatagcatgtaacaaaattagcaatgatttatcatcatacctagtacatatccaaactattaaaattatttgtaatattttctcttgttaatatttaaatttcttttcatatgcaaatttctagacatgttattatggcagagcataataagccatagtgtgtcccataactataacaatttcatgccacaaattatttaatttctcctctctcagcctcttgaacttcaaattatttttttaaaaaaatcacagatatctagtttacatctctaaatatttctgcatacataactaaaaataacaactcctgtcacataagcaaaatgtgattattatgctttttaaaatccaggtaattgacatcactaatcatcagagaaatgcaatccaaaaccacaataagataccatctcacaccagtcagaatggctattattagaaagtcaaaaaataacaaatgctgccaaggttgcaaagaaaagggaacacttacatacactgctgatggaagtgtaaattaattcggccaccatgggaagcatttgccccaacaatctcattattgggtatatactcaaaatacaaatggttctaccattaagatatttgcacatgtatgttcatcaccgcattattcacaataactaggacatagaattaacctagatgctgatcaatggtagactggataaagaacatgtaatacatatacaccatggaatactatgcagtcataaaaatgaatgagatcatgtcctttgcagcaacgagctgcagaccattatcctaagcaaactaacattgaaacagaaaaccaaatacctcatggtctcacttataagtgagagctaaacactgagtccatatggagagaaagaaaggatcaatagatattaaggatctgcttgagagtgaagagtgggaggagggtgggtactgacaaactacctattgggtaccatgcttattacctgggtgactaaataatctgtacactaaacccccacaacacataatttacctacttctcaaatctacacatgcttctgtgaaactaaaagttaaaaaaaattgtaaaatatccagctaacattttgttaattacttcataactgtcacacgtgcatatgcacacacacacacacctttatatatggctagtgtttctataatgcttcaaataaagcacacatgttgaaataggttgatttgtcttttaagttgctatttaggtatcaattctttctccggtcttttttttttctcacctgcaaattatttgtttagaaatctgtatgcacaggaaagagttaattcagcaagtctggtttgcttcaaccccacacattcccaagaaaggccaatctttgcaattggcccttacctgggttctgggagatgagctctaaagctcttgaaatattctgcctcataacagtgtttttgctgacacctttgggcacagaacactagttttatgagatagtttattaacaatgtgatctataataaattgctgtttttgctctttgtgactgaagtctgagtgtctgaggtcaggcacataggtgctacatacataggtaaatgactctaaataaaacacttggatcacccagctcaggtgtgctttcctggttgggaggacttgtcacacattggcacacagccttactgggagaattaagcccaccgggtaagttcatagggagaagacacgtgggagcttgtgcctgctttctactacactttggcccacatggcttttccctttgcttatttttaatcttaataattttactataataatactatatttacgccacagtataacaaattttgtgagtccttctaattaattattggctctaagaatagtcttggggaatcctaacatactgtatcatttattctttgtttctctgagtccggactttgctaaccaactgatgtaggaggtcagacactatgtcttggctatgtgactagagagatataaaagcccccgcaggaaacatctgcttccttgagtgctctccaagtctagatttatcacaaaaatcttgttggttcaatttcaagaagattagagtccttgtgggaatatgaaagatcctggggaattgtcgaggaagtcttctatgtcttctcaaatgtacatgaactcttcttttcttactgttttacattactagcctttgttaaatccttactatattacattactagcctttgtcaaatccttaggtgaatacgctctgtgaaattgtactaattctttcaaatatataaacctgagtaacctttatacctatattattgaatgaacaattaaacctattattaaaacaacacttgaaataatggcttcaagtgtttgtgatctaatattgatcatgtcaataactaaactaaagaactttcagagatataatcagatgcttacaagtcaacatgcagtcaattctgttgttattacccatgattttatttttaaggaagaaaaattctaattaacctgtgtctgtaaccattgacactgggaatggaccagaatacccagaaaatatcacagcatttatatcattggaagaaattgaaaattttatcatcatagtcttaaattacttgtataaaatgaaaagcctaaaatattaccaaactaaaaggagttgatacaaaagcttgaataatttcattctgactagtattttactgaaccatattttcaaaaatggtaaagtgtgtaagaaagaatctagatttaaaaaaaaattaattaaaatttgttttctaagattacccaaagcagctctatgtgaaatggaaagtaattaagggatttcttactactcctgcccataggagatgaaagcatcaaaaaattaattgaataataaatatcacagcagggaaacaacattatttgaatatcaccatctttttggctgggatcccagaagaacaggaactcatggtttgtcaagacagaaaaacaagtcataggttctctttcaattctgctgtaacaaaaatatattttttcctacaatagcagtattaaaatttagcataacctgaagccttatataataaataatgtgaaagaaaaaatagcatagtttgtatttatatagcattgtttaagacaagaatgtataagatttttggaataatggttatataggccaaaaataatgcatatttcacacatcgtcataaaaccacattatgtcatttgtttctattactttgtcatcttaagaccactattattttagcttgtctgaggaatgagaatgttctatagatcttattaaaggcataccgttgttcaccatttttattagtgaaatgatggaatagcatgcttttttaaaataaagacttgaaatatctgctgaaagtatggactagaaatcaataagaactgaaaaggcaagtactgagacctaaattgtcagcattaaatcagaaagaatccatttttggcacacaataacaggacactgagacgatatagtggctttccccatttacaaaaaaaaaaaaaaaaaaagcctttaattacttcaaaaaacaagaaaccacagatccagctcatcaaattctacatgatcaaggtcctgctcatctctataagcctaatctttagccattccttgtaatcctatagacacctctacaaggctcattgtttagttacgtggaatgtttccatttttgcaaagggcttttatggccacttgctttgtcagtactatatgatattcattcagcctaagtgatttcaagcagtatccccagcctcatggactttctgtttaacatgaactttagatcactgctcgttattagtattctgaaacatatttagatttttttaaccttcccatgattgggtttgatgtccttatccggtgttcttgtagcacactctaattaatatttgcaatcagagcatacaccaagctttgtttaacttgtttttctctctccaaagatttaatgcttcctgtgaggaatggacaagtcagcttattagaataggcagatagctggaaatgagcaggaaggggagcccctggaaaagaaatccttagaggcgctgcccaccgatagtcagtgctgcccactgacagccaaaaacaatggctacaatagtaacatctggccttgtggactgggctcatccaaccctgatagggatttattaggccctagtcagagataaccatgataggaactctccccactgacgagtgtgcacactcctttaaaaactcaccctaggccaggtgcggtggctcatacctgtaatcccagcactttgggaggccaaggcaggaggatcacttgaggtcggagtttgagaccagcctgaccaacttagagaaaccccatctctactaaaaatacaaaattagccgggtgtggtggtgcatgcctgtaatcccagctactcaggagaatcacttgaatccaggaggcagaggctgcagtgagccgagatcacaccactgaacttcagcctgggcaacaagagggaaactccgtctcaaataaaacaaaaaacaaaacaaaacaaaaaaacctcaccctagagtagtcttttgctcattataacaggggggaataaaaacacccctggctagagatttaacatgctaatgagacatgcaatttatgtattagcacatgcggccacaatgcatatgtgctcaggagaccacccaaaaaatgcttgctagtagcacccgtttgtacccctttcattaattatcatgtaagagacccccagtaaaggggctccccagtgtcagcctatgctggctcattctctccagcagcctgctctgactcagcattcagagtgtactgtcactttaaatacactctgctactacttagtctcgttacatgtctcttggctgaattctttcttccaaaaagacaagaactgaggaccctgcagtgactagtaacaaacctgatgtacctttgtaaaacaaatgtctagcacaatggctaaaattaaataattacctaataattatttaattttgaaaatttaaatatttttgtgttgcatgatttggccacttttaggttttatttcactttttcagtgatttctttccaaattgctcatacataattgttatttttgtaggaggacatagatttcataatttttgaaatatttattcaaattccctattatctggtataatataaaatagtattcttaaatactcttagtaaaatatttgcagacactctgaggcaaaagcaataaattgtagattattttttaaactgtaaaaagttttcctttccacctgcttaatattattgtaaacacattttatgcatggtatactgctacagagcaacccatcaattttattaaaatgggaaaaataggagctatctccaggtagacagtgttggaattgaattggtggatactggctggtgtctactgcttgtgggtggggagaaacttccacacatttggtcacagaagtcttctgtgttgatggttgcagtgtgagagcaaaggaaaacacagtctgagaatttttccaaagcaattcgtgtcagagagcagagattgtctagaatggccctggctcatggaaacattgggctttgggacagaaaacatgaaagggtgaagaataaaggatttttgattcctgggtggccatgtagtcacccttggtatggagctgctgctatgctgagatcagttactaaagacaacagtcaccagtggaatttagaaatagatccaatcccccagggggagttggttcattggatgtgcaccgactaaggaaatgcaaactgataggaaaagagtggaacagtcaacccttgtgagaaagaaaagtaaaattctaaccccctaaatgactgaatgtgccatgtcttggccaaagggatcccagagtaaccctgaaagctgaattctcagccatgatggtattgaggtacaaggcggggctcatctctggaggggaggcttcatcagaccaaattaaggactaaccaaaacagagatggggcagaagcagcctttcataagacacacccaccagtgtgccatgtcattttactatagccatggcaacacccaaatttaccattccttcccatggcaacaacctgacaacctgtaagttaccccccttttcccagaaatttctgcataatcctccccttaatttgcacgtgattaaaaatgagtataaatataactgcagaactgcctctgaactgctactctgtgcatactgcctaaggagtatccctgctccacgaggagcggtacctctgctgctgttgtatactgctgcttcaataagagttgctatttaacaccatcagctctcccttaaatactttactgggtaaagccaagagtcctcccaagctaagccacaattatggggttcgcctcctttgcattagtatggcgctggggggggggtgtattagtccattctcacgctgctgataaagacatacctgagacagggcaatttaccaaaaaaaagaggtttaatggacttacagttccatgtggctggggaagtctcacaatcatggcaggagacaaggaggaccaaatcttgtcttacatggatggcagcaggcaaagagagagtttgtgcagtgaaacctccccttataaaccattggatctcatgagacttattcactatcatgagaacagcaagggaaagacctgctcccatgattcaattacctctctccaggtccctcccacaacatgtgggaattcaagatgagaataccacctgatggtacccttctttttcagcctggtaagaaatcactgaccacagagtggttctagttagtccgaggagatcgagcagtaggagttttatatcctctgtttcatcttttgatatcagatggccaaaaactccactccgggattaattgcacatgtgcagctttctcatttcttcctatagcctattaaatcagtatattcaaccacctcactcagcatagattcccgttccctttgaccctctctcagtgtctgtttctggcttctggccaaggctgtgcttcccagcctgtcagaatggccaccctgcaggctgcagcccttcatgagaagtaaagctctcatttctaaatttattaacctcatcatctttgagttgacattgcttattgtcatctgtattagctaaaatgaaaccaaaggaaagtgctgggtctgaccttgatatcataccaaacttagattttggtgagtctgagctttggccactagcctcagagccacccctcaaaggcaaaattatgcaaggacaacagaaagtacctccgagtcctgtggttaccaagaaagtactcaatgtggggaaagggcaaaacaaagtgatgaataaaaccacaggacatagtgtgaagtaattgttccattttgtagataggtatcatcagcttcctgaggaacctttaataaaatggattccaatagtagccaatttagaaggagtatcttttaagtgctgcagagatgaagagcatgtttgtgttgatgcaggacccacaacttgctatagttcgatggcagatgaagatatataattcagacatgcaggaagatattcctgagggaacagccagcctggtggactgaataaaagccacagtaagatttgtttaccttcagaagagggactgtctgatcccccctatacatgtcatgtggagcacctgagatgaagtagctgttatgcttttatatgcaaaccatgtggtcctggctttaatgatgacagagatattcaccccctgaatatgccagttactcagatcatggtaaatactacggttaagggagcctcttttacatgggcactacacatgaaattactcccagagaattgaacaacagtttgagaagccttatcaaatttgctgtctcagcttctcttcagggatcttacacatgctaagaaaaacgttaggttaattaggctgggctcaatggctcatgcctgtaatcccagcattttgggaggccgaggcgggaagatcatgaggtcaggagatcgagaccatcctggctaacacggtgaaaccccgtctctactaaaaatacaaaaaattagccgggcgcggtggcgggcgcctgtagtcccagctactcgggaggctgaggcagcagaatggtgtgaacccaggaggcggagcttacagtgagcccagatcgtgccactgaactccagcctgggcgacagagcgagactccatctcaaaaacaacaaaagcaacaacaacaacaaaaaaccttaggttaattaacaagggaatgggggaaaggcacaagggagagtgaaatgactcatccctgtgggatgaaaatacttaaacgcgtactaaaaaaataaagtgaataaagaaaacattgttggggtgaaactagagattcaggaatcgagagagtcatgaaattcaccccagtgtggtggaaatttttagatagtttataagatataggttaaataaaatgaaaattgatagggttaaaacaaaggtcttaatgcaacactgtcaacagttgggtgaaacaaagggagccctttctgtcccccccaatatcacagagcaccaaatcagtttgctgtatcactcccagctggagaattttaaaaggctagaaggtaaagattacaataagaaacttcaactggaattgcctaggacaatggttaacactggttaatcaaggcagcaattcacagagtccagagtcatctgataagaggggacccaaagtcttttgcaatagagaagataaaatggtgtgggggtgaaaaagataagtttatggaactagaacataaaaatataagggttggtaagattataaaacttagtatatttgaacacacttcacaggaattggttctccttctcctgatcatattatggaaatggacactgtatctgagtggggaaagttttctctacctagtcccataaaacagaagacaagtaaatccacttgtgttaggtcattcttgtgttgctataaaggaacacttgaggctgggcaatttataaagaaaagaggattaattggctcatggttcttcaggctgtacaattatggcactggcaatctgcccagcttcggggaggcttcagggagcttctactcatggcagaaggtgactgggagcaggcacataaaatggtaagagcaggggcaagagggagagtggggtgaaggaggtactacacgtgtttaaacaaccagacctgatgagaactcactcaccattgtgaggacagcaccaagctatgcaggttcctcccacgtgaccctaacacctcctacgaggccccaccttcaacactggagattacatctcaacatgaaatttagagggtacatccaaactacattaccacccttcaagtaatgtaaattcaatatgatatggtaaatgggtacctgcaagattgcctaagaccactgaatgcagggtagaagctagaatgctgttagggatgaattctgctcttgattgccctttgtagaatatttactcaggcttatgaaacaagcctgtgagtgcctcccaatgcctactagaattttggactagggaatttccacttttttttcttttccttttttttttttttttttttgagacggagtcttgctgtgttgcccaggctggagtgcagtggcacaatctcggctcactgcaagctccgtctcccaggttcacgccattctcctgcctcagcctcccgagtagctgggactacaggcgcccgccaacacgcccggctaactttttgtatttttagtagagacggggtttcaccgtgttagccgggatggtctcgatctcctgacctcgtgatccgcccacctcagcctcccaaagtgctgggattacaggcgtgagccaccgcgcccggcgggaatttccactttttactgccttgttatagtacattacctgaagttaccactatgacagaagggcatacaatgatcttgacacctgaaatacccatgctgtccaagatgatgtcagagaaactaatggggatggcagtgcccccaaagagttctgtaataaaatggaaatgatttataaaggattgtgctatgtggggaatatggagaaaatactcacaagctgacaacatttttccctctgggactgactctggaactatgtgaggagctgctggatcttacagtgctctcaagtgactggcaaacaatgttatggtttatgcatgccagttctaaagcaaataatgacatcccatctggaagtctgctacgcttttgaaagaaggtaaaaacaaatcacctcggtgggctgaattacatcttgtcttctaacagcaatggaagtactgaacagtggtagaagtccctggatttgggtttctattaactcatgggcattggccaatggcctggcccatagcaacaaaggcaatgcacactggacctattaaagagatatccatacacagccttatggaaatttgagggatgctataaagtgaaacatgtcaatgcttatcagaagagcccctttctaggtttggaaggtgactggaattgacaaaacagatatccccatatgcttccttgaactggtcacctgggtccaaggaatgggtagatatgaggataccgcagcagtgaagaggtaagctgagtctagacatgtttctcttataccctcccaggcacaaaacacccttaagaactatcctgtctgccagcaacagaaacagagaccgccgatggctagggagcatattctctgttgggaaggctcagaacgtagctggtaagcgagactgatgctggtagccctgagtatctacaaatgggtattgacagtaatagacactgagtctagagtgggctttgcttaaccagtggaagatgcaaatgctcagagtgccaaaacaacaacaacaacaaaacaacaaaacaacagcaacaacaaacagaagatggtgcctggatttgggtggctatcatttcttcagtccacggaacacactgtacagcccacagtgtccaataacgtgcagagagagacatcctcctcaggtcaatagtttgctagagaagtagattgggaattaaaacactgggggacataaaagcacaaagggctgttttacatgccttcatgagtgtgtgctcacattcaacatgactgggactaaaggagtgtcctgctagatttttctctgtttttctgtttgatctggggaagagaagatgagcaggatgccggtatgactgaaattcttgccaagggagaagtacactggtataactaacattattttttctttctttccctaataccctcagatttagtttttctctactgcctgatgcatggtcttaagaccagggctacaactacaagtgctgaaagcaaggatgatttctaagcaagaaactgaagctacgtttttaaaccttgtgccagaattcctaagggcctgattgggtgggtggtactttcatctcatctagcaagtttgggggctaagagtgcatgcaactatattgcctggtggtaaaaatagctcgctagttctgcacctatgtaactttaccctatttaaattgaagtggactgataaggaggtacttgctagactagtgttgctgcctgcaatctagatcagcacaagggtaattctaatgactcttccagaggtgaaaatatttgaatattaattatgagaaggaaaaagagtagctgagaataaaataataaatgggtattaaattgaggcaaacacattacattaataccttgaaagaggctctgagcaagaaatggcattgtcttttagctaaattataatagataactaaaacggtgaagccgaatgttttccaagaccattcctgcttttggaacctgacaagattgaacgaaagcctgcaaacctgagtggtctcaccttgggagacaataatgtaatgtgatgaactgcactaattattaatgacttaatgagattctagtaataatggcaatatctactgagttatatgtccttttaaagtaagagatctgggttagaagaataaggatggactgtcatattctgaaatttgcattcttttttaaaatttttatatatatatttatttatttatttttatttatttattttttttgagacggagtctcgctctgtcacccaggctggagtgcagtggcgcaatctcagctcactgcaagctccgcctcccgggttcacgccattctcctgcctcagcctcccgagtagctgggactacaggtgcccaccaccacacctggctaatttttttgtatttttagtagagacggggtttcactgtgttagccaggatggtcttgatctcctgaccttgtgatccgcccacctcagcctcccatagtgctgggattacaggcgtaagccacacgcctggccctgaaatttgtattctgtcttcatcccagtttcctggcatgcaactcctaaaatacttaatatcttcagaagtaaaaaagggaaaactttaatgaaatcctataaacaacataatggatagttttatttacaatttttaccattattattattatttttcttcatccagggtagagtgcagtggtgccatcttggctcactgcaaccttttgtctcctgggttcaagggatcctcccatgtcagccccctgagtagctgggacgacaagtacacaccattcccagttaatttattattattattattattattattattattggtagagatggggtttagctgttttgcccaggcttgtcttgaactcctaggctcaaaagacccacccacctcaggcccccaaagtgctggaatttacagacattagccaccacactcggcccaatttttaccgctcttgaatttctcagtgatctaaggatacacaaccagaatcttcacagtcatttgaaggtataaaggtcacatgagaggccagttttagatgcataaatctatagatcttcttgctaaatacagaacctaaggaaattatttccatttcttctggggcccacccaaatcgaaaagagtactactaaaagccaacactctgggcaaaaataatttctacccaacattcctacttgttctgcatgttaacaatgggttttctttgcaattagcataccactttgaattaaaattctggcagccaaatatttttgaaagtatccccaaagtactgctactcaaagggatcgctacattgttattccagaaacacgttttactaatgatgaaggatttgtctttgcaaactcctatagtctgaactggttcagcagactcagtggttaaacagacgcattatcttcgtgaatttgcgtccactgcagcacacttttttggacaattttaattactgataaatgaaattagcaactccaatgatgatttatttttggtgtttaaaaagttacaatttgatatcaataaagcagtgaaaatctagcagagatacaaacatctaaattaatgattttctatctattttataactgtgtcgccatagctatctactggtaatataatacaatatcatgaaaataacagttgtgcaaatcataactgtcgggtaaaatcagcattaagattttgacactgtaggcagttaggtctgttaggggtaatgaaaattcaatttccaataacaaatataagtaagcagattgcatgtcatgggattatgcaaagatatctttttgctcaacttgaaacatgaggctgtaaaaggcactctaaaattatactagaatatgtttaactgcaagagacagtaacataataaacatctaaagcttgaaagattgttgtgaaatgtaacacattttttgacttagtataattatcaaaggtttttccttatccaaaaatgtttcttttttaacacatcatttaaatttatattaatccactactatctatggctgtcttgagaaaatacaaaattttaaattcttctgaaacagaagatgtatgcaagaaatactcacaatatatgtatactaaccaaagcaatctagtgttcagacaatattaatcatagattcttaaagaaatatcagagagcactcaatgcaacatatactgagtatagtgagaatggcctctgctatataattaaaagcattttctcacaggataacccttctcaattcataatatttatcgttattgaaaaaataaaacaaaaaatggtttctaccttcagcagaaaattggtttaacataacaactttctctccatggtcctcctaaggcccccagaatgtgtagagtaaaatttgttttaactcacagggaagccctttaattacattaaaatatgttaataattgtagttttcatattgttttttacactttttaaagttccatgttatttcattttagtagatctaatgagaagggccttagatctctcatctccgggctgttatctctggcaatataccattttacaaagtatcctcataaataaatacatagtcaagatatgattccagaaacagaacttcaattgttgtgattactagccttccattatccaggttagagtgcattgactttatggttaccattatatttgtacactgatgaatattgcaaaagctaaaaacttgctagccaatagtgtacagcacatttagaccaaaaaatgggacctaatcttaatctatactgcatgtttcatttcttggcattattattattattttgagtcagagtctcactcttgttgaccaggctggagtacaacggtgcaatgttggctcactgtgacctccgcctcccgggttcaaacgattctcctgcctcaacctcccaagtagctgggattacaggtgccagacaccacacctggctgacaccagggaaagatgaaaacgaacaaaacaaaaaaccagaaattttcttcattctcccttcaatcatttcctagaagcttttctcataagagatgttcaagaaatgctgtttgattatttattttcatgtttagtacattaatcacttaggtttttttctacttgttattttaaaatgggtagtaataggaattattcttggacaggttagatttggtgaacctccaataatacccagtgaataattgaatactatgcatgtaattaaggctgaaactaatactgttgataagtaattaaaattttcccaacatcatatagaaattcaatattaaggaagagggtagaaaaattatgctattagaggatttttaaagggttattgcttgcactatttcaaagaaattctgatacttttggttattaaattttttacatataataattagatgtaaagcatagagataatatgtctgttttcctgctagagcaatttgcattattgagaaaaagggagtaaatatctgcagaaatttattaaggctgaatttagttttgaactaacaaaaacaagaacaataaggtctcccagtattaccaaataagatatttttgggggaaggtctattttccagaataagaaaaacctctgtgtgttgcaagcaaattaaagaaaaactttcaggactggttcttttatcaatgtttttcttcaatcatgccctctttaaaaaggccattcttacaaatgagatcctcattgtctatttgtcatgtaaacaggtgggtcaagatgtgctgacattaattgaaaataaatgtccataccttctttcctgaaatatatttatatgttgtcattttcccagaatagtaaccttaatcattgccaacaggaaatactcaacagctaatttcataaaacatattcaacttaagcagtaacttttttaagcagtgttcttttttaaacactgtcatttctagatttattcatcattcttatttattgtaaaagtcaaggtgcactacagcaatttaatgtacaccattagaagataagaaaattaggatatgatctaaatgtgtcagactatgtgaacattacaccacaaattatcaggtatagttacagcaaaatgtgactgcgttcaatgtgaccgcattcaatttgaccacattcaaaatcatatatttaaatttaggatttggtaaatgatttattagttgtgctcatgagataatatgagcttaataaatataaaatgtagatgacttgaataattggctgaatgagaattcccttcaccaaaaagggcaacacagtaagagagtagatctgatttgggaaaaaataagaaaaatgatttcaaaatacaaacattaaaaatgatttatacattcatttatttacacagaaaatattaattttttgattactaagattcacacatatttctgagatctggtaatatggcagggagctgatatggttaggctttttgtccctacccaaatctcatcttgaattgtaatttcctgttgtttagggagagacctggtgggaagtgactggattatggggatagtcctttccatgctgtcctcatgatagtgagtgaattctcacaagatctgacagtttttggttttataaatggtagattttttctgtgctgacacatgccctcctgactgctgccacgtaagatatgccttttttgcttctccttcacctttcattatgactgtaagtttcctaagtctgccccagcaatgcagaacagtgagtccgttaaaactgttctctttacaaattacccagtctcgggtatttcttcataacactgtgagaatggactaaggcaggagcaaagcatatatggttcctcattgtaagaagcttacattttagtgggagagaaggttcctcccaaataaaagccatatataaaatagtgtctgatgatgttcacccaggtagagcaagggcagagattttgtaaaaaatatgagactggatgcattcaatagtacaaatgcatcagacagatcagatattgtccttgcaaatatatacaaacattccataattaggaagtcactaacaacctcagaggaaaaaaacagttaaagattaatgagaagatctagtgattcctgtctgggttgctgtagaataatttttttcattaggtggaaaaaaagtaagacaagattaccattcaatgggttcacttagtgacatgcatagaagccaatactatggctctagcttttgagaaaagaaaaagcattattataagtcaactggcaagaagacaggaggccatagtaagatctgattcacctaggtggggtctgggggcaggttttataggcaaagtaataatgggagagataggaaaatgcaatcaggcatgatctcattaggtcatgcaaaggggaagagccagatctgctacaaaacagggcacacatctcttcatatttcaatacccattcccaatacaaacactaagattacacctgcagttgacttttttgttccagccccctgcagggttacaaattgggcatgcttggttcatctgggcatgctcaagctatgtgacctgaaacctgggggtccactgcactgaaaaacaactcatcattttgtgacattttgctactaaaaaagttgagccatattggttctgtggttatcaatctcctcatattttttattcttcaattttgagggaaagggggtgacaactgctctagtgacttctttataattagaggcatgaatacaggttagaggaatgaaactgtttatcatttccttgtaaaggttttctagtaagaaaaattatttttagttttaattggttaacacagctgagttctgattggtctataggtgagccatgataggccaaggcagaagagctatgattggttgattcaacacaatcatggtgggggtctcttgtgacctttgttagaaaagactagaacaattttaaagaggcgccaaatgcttagccttaatataaggaaaatcatgaagtcatgtaaggtagaatgcagaagtgatccaataccagtgggaagcctgctaaacatatctgaaaactcgacctttaacccaggaagcctagccagaaggctttctaaagctgtttctacttatataaataaaataagaatactcataagtagtttttgaattttggaggaatcaagtagaaataaaaagcaaatgcccccacctttgttcacaaaatgatactttacctaataattgcaaactattaaaatagatataaaaatagataacttttgaaagaaaattccttgaatctagaaaacaatcttttaagggagaactaacattttgaatacagtcttaaaaatgttgttcctattgccaggtgcagtggctcatgcctgtaatcccagcactttgggaggctgaggcgggtggatcacaaggttgggagatgaagagcatcctggctaacacggtgaaacctcgtctctactaaaaaatacaaaaaacttagccgggcgtagtggtggatgcctctagtcccagctactgaggaggctgaggcaggagaatggcgtgaatccgggaggtggagcttgcagtgagctgagattgcaccactgcactccagcctaggtgacagagcaagactccgtctcaaaaaaaaaaaagacaaaaatgttgccccatcaattacttaatttcatgtaattaattttgttttgctctaatcaaaactgctattttgattagcagttccatgaaaagcaattttggaccacagctgattgcatatgtttccagagaatttaaaacaataactgtggatgacaataaaacagaacaaccatagtaaaaaaatctaataaaaatttacaattgacaggaaaatttaggtatatctgtggatacaaacatttttaatcataatcataataattgaatataataatcataatctgataacatcacaaaatattcaaaattttagaaatgtcatacagttttggagtgcaatggcacgatctcagctcaccacaacctctgcctcctgggttcaagcgattcctctgcctcagcctcctgagtagctgggattagacatgcgccaccacatctggctaattttgtatttttagtggagatggggtttctccatgttgttcaggctggtctcaaactcctgaccttaggtgatccgcccaccttggcctcccaaagtgctggggttacaatatttttaatgtgaaatctcaatatttacaggctgttataatttctattaattattgccaactaagtcatacagcaaatttctttcacaaattctctttcacaatccttatcatgacttacacagatcatttatggcgtgctttgactttctgctttgtactatatgtgttttttgaagagccaatcattttactccaggacagaaatttaccacacaagattttttctcatataaaattattatcttctattcttaacctttcttaccaaaaacacatctttacatccatgtgttaccccaaaccagtttttcattactgtttgccggcaaatatttacagctattcccatcaaatcgacaacattagactagtcccattcaccaaaacatttataacttatgtgaacttgaaaagcagttggcttatttgcttagtgtataaatacccatttatttataagccactttggtaccagagacaatacacaaacagatatgtatatagacaggcacaataaagtttttatccttgtgggaaatatcagtggagctaatgaaatatggaggaacccccaggtcgcatcattcctagtcactatctgcaaactgacatttggtgggggtgattggcagggttccttctctacctgtagggtatagttagaacatttctacttccaaaggccctcttgtttacaatatgcacgttattgtagcccaaaggctgggtagctttttacctgggcagttgagccccagggatcttacatatggccatttgttttcttcagcaaacagctttttgtgtcctggcagggactcgtcatgaccaagagctatgaagaggagcatagtttattgtctcacgtcacattatttttgcctttcctggatttggttatggctgttatttaaatattttaaaggcaatctcaatctatcgagacactgggatccccaattccccttctactctttgcagtatgtttttttcttatatcaaaggtactctgactgataaaagttatattaagcagtctcatgttacctgagtattcacagtcaatgccagtatattgccttagacttcaaagactctctcaagaaagccagagggattttcttttggcccctgttatacttgtatgactagtgccactacagtcctgctaaaattaatgttccccattttgtgcagagctggagcaagaccctgcactagagaggtgttttgggtctgtggtgtggtgttcatgggaattccttcccagagaatcaccaatgggccacatatctcctcttatgcatctcagagggtccctaacatcaggtggtgttgggttgcttaagatgccggggtgactggtcatcgtatgtgcaccttcctgataagcagttaaagttctgtctgactcaggaatggggtatgtgctggtgggatttcctaaaggaccacttcatgtcacaggccataaaacctcaacatgttactagtggaaggtatccccattactggcagtgaatccgtatatatctgcagcaacttcaattcttgcctcctcagaagaaagaatttgactgaggggcataaggatgaagtaagaccaaggcaagtttcagcacaggagtgaaagtttattaaaaagactttagaacaggaaaaaaggaagattcacttggaagggacccaagtgggcacctgaaggtcaagggcatttaaccttgatcctaggactttatagactcacctctttcccatgattatttccttagagtgggcttcctgcatgcatagagtctcttcctgcccttgggtagtgagcacgtgcagtgtgttgaggaagatgtatgcatggccatctgaggctttcttcccttttctggtggagtatccccagaaggtcatactttgccattttgtctcttagtgcacatgcccaggaagctgcttccccgtggcatctgcgttcaattaacacattaatgttaacatctgtggatcatcaggagattgtctctccctggcacccaggccccagtgcccgctgctgaattaccggtgttaggcaggcagtgtgataattgttgaaccatcacctgacatttctagtgggtgggaaataagagccctctgctgccatgcccatgcctatctaactgcctgtaataaacactttgctgggctcctagtcacctaggaacagcctaaaagggcccaggggagcagagcaatgtctctcgggagtctaaggaccctcatctagataattttttaattaggccgctactatgaacaccaaggttttaaccattgttaagtcaaatatagttacacacactaaagacacaaacacagacaagcagaagtcaaaattaaaccaacctgagtacctcagtgattacagcattttattatcactcttattctttgggaatctaacctcaaacagattcaggatgctaatcagaccaggatcccaatagggtgggactagaacccaaaattcctatgatgaaacctttgacaatttatgatataggcacatattagtgaagtactcatccccaagacatctaagccagaagcactttctttttcccaaataagaaagtagtactgctgagcctgaactgtcgcagcagagaatcagtgatgtctcagtcaatcccctagataaaactgttctaggtggccattctgtcagtgaagggggcctacaacacttcaagaggctacattgccacaggcagatttttgtaccatttgggttgcaaaaaatgttaccaagaatgggcttgctgcctaatacttggaagcccatactatggtgttggcttttaagaaaagaaaaaagctttattgtggagtcaactggcaacaagacaggaggcaatgctcatatcactatccttcagctgggatctaggggcaaatttatagatagtaacaatggaagagatagaaaaatgcaatgaggcatgatctattagaatatgcaaagaggcatattctaatatgccttggctcctaagtacctcctgcaacaaaacagggtacaccttggtttttaactttggtcccctttcctcaatccaagatcttaggttccacctgtgcttaacttttttgttctagctgcccctggggtcaaaattgggcatgtttggttcatctgggcatgctcaggtaacttgatctgcaacctggggatccattgcactgaataaaactcatcattctggctaggtgcggtggctcacgcctgtaatcctagcactttgggaggcccaggtgggaggattgcctgagctcaggagatcaagaccagcctaggcaacacagtgaaaccctgtctctactaaaatacaaacaattagctgggtgtggcagtgtacacctgtagtaccggctactcaggaggctgaggcaggagaataccttgaatctgggatgcggagattgcagtgagctgagatcgcaccaccgcactctagcctgggcgacagagcgagactccgtctccaaacaaacaaacaaacaaacaaaaaccactcatcattctgttactttcgttattgacaaagttgaactaaattgagttgattctggcattaaaacaatatagtgtaatatttaagagaagttcagatcatatcttggttgagccatcagaataattatagagataaaaaatgtgctctaaggaagacagagaaatgctaacagagtgtttacagcaagggaatcattttccatcacttgtgttttgctaagattccaaagcaggcagggtgtgggaacattttacagtgaggaaaagggaaggttttaggtgtgctctgattggaatttttagcggttgtggaaaaaaagaccacaaaaataagaacaaagtctgtctatatattcagaggttgctataacaagggagttagtcaccatcacttccctttatcagagagtcaacatcaggcaagagagtagaaaaactttatagtgaaaagaaagggaaggcttcaggaattatctcatgagagaacgcaggcacagagaaacaacgtgggctaagcagaagtggtcattttatgtgtttggtttggggagcatatttgactttctcttcttggtctagggatgaaagtgggaggaaaacaaacaaatgaaaaacagagatggcagtcattaaaacattaaaatcatagcagctgtctctctaggccaacagctgcacaggttgtgatttggtttcctgaacttgttgctgcagaggttgggaaatagaatttaattgtcagtactttaggaggctgaggtgggcggatcacttgaggtcaggagttcaagaccagcctggccaacatggtgaaaccccatctctaccaaaatttaaaaaaaaaaaattcagccaagtgtcatagcgcatgctggtagtaccagctactcaggaggccgaggctgtctctaccagaaacataaaaaaaaattagccaggtgtggtggtacatgcctgtagtcccagctactcaagaggctgaggcaggagagttgcttgaacccaggaggcagaggttgcagtgaactgggatcatgccactgaacttcagcccgggtgacagagtgactccatctcaaaaaaaaaataaaagaatttcattgtgatataccatcttactatttatttatattcagcctctcacttgtgctgcattacactgcctaaatcctccctccaaaactgcagaaactaacccctgagcttctgggattgtcctctatcagacctaaattcatgtctcatttctgaaaagcagctttcatccaattactggtggatatgtagttttaaaagcccaaatgaatctctctgacaaacaaaatatatgaagggatatcccagctcctgagtactcctatggttttacaaaggtcttgctataattaaaatgtagcactacttttcttctgcccagttatacttctgttattttctctcacaaatattgatcataaggtcattccctagtaaatttccttcaaacttatgtttccagggaacctgatctgcaacattaaataataatatttgtatgtatgaaggctgtacatctgagctagagatatgatggtctctgtggccatgcctgcaaaaactaacatttactattacaaaggttattttaaaatatggttcataattttaattatatttaaatcatatgatatatctaggtagacagatacatagagatagatagatagatagatagatagacagatagatagatagacagatactttttaatctagaccaaataactgtagtttagaagatactgaattctgttaagcaggtgttgatgaatcttccttatgaggttctaaacttctaggacaatgtgatcagttatcctgtgcttcttctcccctatttatgtttttttttcaagctgtgatacccaaactttgttaatttctcagtttctatctcatgttatacctttcaattgtgatgcattgatatctgcttttatttttcttttaatgaagttgtgctacaacttcaatatgccatctttcctgttctagtaattcatatttatttttattctaaccaatagattctatgcactaaaggcagtaagcattcaatgtttattaaaataagtgtctatatatgtgtaaaatctgtttgcagaaattttcctgaaatgttcatagaattgatgcttacatttatacaactttgaatcaacagaaatgggacaccatgcccaaggaaataaaaaatatcttaaagttgtagagctcattggaagcaagattaaaagtgatattagaatatataaataactacaatagaatacctaatcaactcattttttctcacatatgaattatttgcttattatgaaatatacttcctgataatagaaaaggcttaagataaaataatggcttttattttttgtatttaaactgagcttgtttcctaccatttatgggcataagataccatttgtcaaatacttcacgaacagaacttcatttacataaactactttgagcatcaggcacatatcattttatacttttgcaaatgcagtaaccaagaagcagagattcacctagctgtcatgaaatcacctagggattaaaacaagagctctctattggcaaagcctatgctctttatcatttctactacattgcttctcaacgtattattggaaagttttacatattggccacatttttgtcctactattcttttactactcaaataaaaatctagaaatgaatgacatttataaggatgcattattttttactgtactgaggagtgtgtctctaagattctcacagccacttttcacgcatttcactgatgccaggcaatgaatttcacttgagttcttttgaattggtttcaaaatgtagtagcttttaattaatctcttctttactagtttttctttactttaaaatccacattaactttaaataacgtgtcccgggccatcaacttttatgcttttgttttaagaatttgaataaatttaattactgagtgatttcctaagggtttacaactttgatggatacattttccttaatttttttatcacaagtcataaaatcatattgaagaccgtaatttttaagatattaaccatattgttatgctagcacccatgcgatgtgtaaaaacatgacactcttcccagcaagtagaaacagtataaacataaaagtattaacatagttagcattcacagtaacaaacacagtttcattcattttgttcatgtataagcttacttatatgcatatgttctgctaaacttgcagtttatcagaaataatgaaagcttcattattttacaaacatataaatattttaattattttacttaaatacataaagaaaaatgaaaataaaattttaaaagggagaggaaaaaagagatacaaataaacagtagatgttggtcctattcacaacagtaattcatgataatttgcaaagccacaaatctgaaccgaacttacattcaaaacttacatttcaaaagccgttgtttaaagaacagctttttaatttgcacacacttatgaaagcctacccacagaaaacttacacttttgaaatagaaatcaaatataggtgaaagaaaactttctgagtattctgagcacctagaaacagagccaatatcatgaatgatataacttataaaatagtacattgagatatccatttctctgaccacaatcctctacaatttaattatttaatttttattctctcactataattatgctttgacaacacaaagatgtccagtccttgaacatgtcattcactctccctcatgcctatttttaaattcttctctattaagctaacattccacatgggtgatcgaaactcttcacaaacaaaaaatgtgtaatatatttgcctcattggtctttattacatctgcctgtaaaacacaaatcttatgcagtccaaaatttaacttagtatttgcaacaacaacaacaaaaaacttagactgcaaggaaaaggacacaaactttccaagcattactttttctaagtttatggcctcaaagcatcactaagttgctaagaatacaaataaatacttttcttcttccaagtcagttctttttcaaatcattaccctactgcattcattgaaatgctagttagatttgtttcaattcacttttcacgagtgtaaatgaagctataagaaggaaacgaattatcaaatatcaaaagttactctctgcatcagatattattcttactttttcttacacttacaatgactgagatgccactcatttctaaatgaaggagtcatgtcagagtctttactttgcttaggttctttgcagaaattaattctactgaacatttaccccttcataaaattctttttttttttttgagacagagtctcactctgtcgcccaggctggagtgcagtggcgcgatcttggctcactgcaagctccacctcctgagttcatgccattctcctgcctcagcctcccgagtagctgggactacaggcgcccgccaccacgcctggctaatttttttttgtatttttagtagagacggggtttcactgtgttagccaggatggtctcgatctcctgacttcgtgatatgcccgccttggcctcccaaagtgctgggattataagcgtgagccactgcacctggcccccttcattaaattgtatattctttcaattttataacaccatgatatcttgatttggggttgttcctttggccattcctagaaacaactgccttccttccttaatattttacaaagttctctcaaaggttgttgttttgttttgttttctctataccttaactctaagcgaagacccacatttttattgtctccattgctgatacagtttcacatcattcaaattaatattttcaggctagatgtatctaatttgcatatgtttaattccaattacaagtaactcaatagatgaatagacagataaaagcttatttttgcccattctgtaggatatctttttactttcttaatgttctttaatgcacagcagtttttaattttggtgaaatcaaaatttgtctattttttcccctgttgctcatgcatttggtgtcatagctactggcaaatccaaagtcatgagaatgtacccctaggttttctcctaagagttttatagatttagcccattggttgattttgagttaatttttgtagttagcatgatgtgggagttcatgcatatccatttgtctcaacatcatttgttgaagagatgattccctctccagggaatagccttagaaaccttgttaaaaatcaattggttatagatgtatgaactcatttctgggctcctgattctgttccatttgtctatgtgtctggcattgtgctagtgccatgctgttttgattactgtagttttgtggtaagtttagaaattggaaatgtgagtcctcttgctttgttcttttacaatataattttggaaattaaaaaaaagctaactagctaacaaataattcaccattaccacttccgccaaacatgtaactgggtgtcactttaattcaactctacttttcaagtcaaattctagagaattattcttgaatcttactctttcccatgaggacatccaaagaagttaccaaattctatataccatataatctatttttgtttattatttgtgcaacttttcttctccaagacaccattatctttctatttaattgtgctaattgtttcttaaattttctcttcacctccaggttttctaccctgcaatcctatttcaccctaatcaattttgctcattgcagctattattatctttttatgtcattttgtatcttataagtcataaaacattttcaattttagaataacatccaaagttttttttcaattttatttattttggtaacatccaaagttttctaacccacattacttctcaagagatatatcacatttttatggttaattttatctcctaaaaattcatatgttaaagttctaacccccggtttcctgaaatatgatcttatttggaaatagggtccttgtagatgtcattaaattaaaatgaggtcatattggaatagatgagtacctaatagaatatgtctggtgttcttttgtaaagtagaaatatagagacagacacacacagagggacaacaacatattaagatgaaggcagatattggaatgatgcaacagaaacaaaggaacactgataattatcaacaaaccaccaatacatagaagagaagtgtgaaacacatttctctttcacagccattaaaaggaatcaatccttccaaaaccctcatcaatttctgttgttctaagccatgcactttgtggtactttgttacagcagtcctagcaaagaaatatgtaggtcatacatgccctaaaactgaagctgcaaccttgcttaattattatcgttttcttaactattacatgctgtcttatctccattccaatttaactgtctactagttatcttcatcattcagctatttcttatactgtgtcaaatatatcaataatgttggtctcaatgtaaatgttttactctggaatgtctttcaaaatgtttcttgtgggattgggggtggaaaatcatgactacaaagttctaagggcagataatgccctcctatggagtttcagatctgaggagctgattaagccaatatcaattagattagaaacctgagaggtttctgtcccaggaacacaagggtggaatgaatcttattaggttgtttcctagacccacctagaacactttctaattagttagatattgtcagcttctcatcctatacacctaaccagaaaaaaagaaaatattttcccatagaatataatgttatttacagtcttaatgggctctttctaaaatgtctcataaaatgattactacgtatagaaagatgaatgaaaatatgactgataatcctaggaaaagaaaccttactcacggttgatccagatactatagttgaacaaggaatctttaaaattccatgcttaatatgacaaacaatatagattaagtgttaaaaaataaagatggaacattttcgttacagagaattgttatctgcaaagtaatggaaaacaaaggagaactttattttctggaaataaacaaataaatgaaatctgtagatctgggaaacgcaggctctgatgtaaattaaagtgtgctctacgaaacaaagagtgagactggcttaaagaaagttcctgcctcagtcttcaatcaggtccatatatgcaaatgaggaattcaaatttcttcagtcctgattggttggaaatagctgggtataattaagcaatttccaagcccaaaccagaagtttctgttggatggccctctcaggtggctgaccacagtgtctcagcttaggttacaagaaccatcctagctcagaggcatgtgcagcatgcttgtctggagccttccttgtatggaacaaagagggcatcattgcccttttctcattcaccatggcctctgggtaagtttcatttcacaagtggaagacacagcactagaagtcacctaaagtaaagcacagcaggaaaaatgaaataaaatacatgggatagtctcaaaagatctagtaaacagacaattggagtgccacaggaggagagtggttatgttttagaagataatagctgagaattttccaaaccccttgcaaattaactcatagaattaagactgtcaaccaattctaagtttaaacactcttgcttacctcctctgccaactcaccctcatgcacttacataaactcaggcacatcacaattatactactgaaaagcaaactatcagaataataaaagcagttaactttggagaaaaactgctaccctcaaagggcacaatggtagggtaaaaactaacattttaagagaaataatagaaaccagagtggacgaaaagatattccaaagattgacaaaataataggcatattggattctacagccaactgaaacattcttcaaaaatggaagtgaaataaatgtttcaatcataaaagagggaaagtaattgtccatctgcctatcctaaaagaaaacatgaaatttaataaaaaaattgaatattattcatagcaatgtttaaccaaaaccatgtacaagaacacacagcaccattatttccaagatccccacactggaaaactaaccaaaagtatatcagcacaaaatagatatattaattttattacatttatacaatagattactatacagcaattaggatacataaaataattttacatgcaaaaatgtagatgaatctacagatataaggtagaataaaaaaactagttatacaagggttcatattgtatgatcatgtttattgtaagtttccctcaggaatatgtactaacaggtaatagtactcaggatattggttacacttgagggtagtggtttgcagagggcaaagtcagaattctgaagaattggaacattctgtttcttgactaggagtcatgtcatatacttttatttgatttgtgaaattaaaaacaattgcatacttatactatgtttatataaataatataacaaatattaaaacaaatgccaaaatgagagttaatgtaagtttcactgtaggctgtaatgactaaatgaatagaacttgacataattcagaagagtaaaatgatttataaacttaaatcaatttttgttaattcgataaaatattaacaaggattcacagagctgagttttgccttgtgggtttattgtaaagaaatgtttccaagagtattgaaaaatattttctctagctttaaacttcaagataattaaagttggggactttattagaatacattttcttaaaaaacttcaaataaagcttttaaaatctgaccttcatgaatgtaaatgtctggtttgttaattttgtgaagatctggggcacacaatagagaaatgaatagttatcctcaagagcagctgaaataggaatacaaaaaatgtctttttgacctgtgatgggagagatagaatcatcgtaataaggcaatgacagcacagattagtttctatgagaactggaaaaaaattcccttttgttagataggattaaaatttttaaaaagtacctcctcttgtgggaccaagaaaaaaggtgcccttcttctgaggagacactgcccagtgtctgggaacccagttgtgaaggcagagggctagctggttttagttttctcttgtgtcatttcttttatgctctattttaacagacataagggttccttttgaggatagcagaacaagagagaaggaaacacggttcctcacacaatgacaccaccctgtcttctaggactgctaaatattagattgctaagaaatagagaaaaaatatatataattaatttagtttgctatttatgttttgatttgatatttatatttgatactgcagccaagcctatatcctaaaaataaaaagaaagaaaaacaaagaaaaacaaataaacagtagctgaagataaactctcaataaaaattataaaataagaagaaatgtacgctagggagatcgggttccctgtcgcctatggagttagtctgtgttttggttttggtttggttttggttttgatagggtctctcactttctcccaagctggagtgcattggagctatcatagttcactacaggctcaaactcctgggctcaagtgatcctcttgcctcagcctcccaagtagttaggactacagacatgcaccacgcctcactaattttttgtttttttatttttggtacagacaaggtttggctctgttgtccagattagcctcaaagttctggcctcaagcagtccttccatttgggcctcccaaagtgctgggattacaggcctgagcccagccattggttctttttcgaaagaatatttctaaagatgttctctctggttaggcttagcgagttgaacatctctctgacaatctcaaagcaaaacaaacaatgtatctgaatgtacagataagaagaccagctggactttaattatgaccactttgacacataataatatggtgaaattttcatatttagagattaaaagtcaacattattatttttttaaagaatggatgatccctatttatggagatgataatgattgttgaacagtagaagggtaaaataagtatgtaagtaaagaatcttcattaaaaataacataaaatgtaggtggacattaactagttaattagaaaacctgaaatcgatgtatacactttgattattttctcttcctctggggaataaaacaacttcctttaaaactgtttgttttaaatctagccagtcgtggtggtaggtgcctatagtcccagctacttgggaggctgaggcagcggaatggcatgaagccgggaggcagaggttgcagtgagccgagatcgcgccactgcactccagcctgggtgacagagtgagactccgtctcaaaaaaaaaaaaaaaaaaactgtttgtttttcttcaagtattggttatgagactgtcacattatccttccaaggtcatgacaaggcttgccaggtacctcatcagcatttctgaaacaagctgaaaattcactaatgataacattattgcctaatcttattgtgaaggcgagttaccaatttactacctgccaaaaggcgagctttaaaaaacagatgaaaaattatttagggattcacataattaccttataaggatttaagaaataaaaacagtagatcagaacaaaaaaaggaaaggaacttaaaaatggaaaataatccatcaaccacagcagattatttacttaaaacattagatttaggttctgacttacattcacaaagcttttgctaatttgtttcaggtttaatgagttttctaattacgctctcctccacttgtacttccttgaaaggcttgagatctgccataactgtatcaagtttaattaatttttaattaattatatattaccaacaaatggtattgtttatgctcttgtaaacttcaggtgccagcctggacacctgaattgctttctgtagaaacagtgaactggtgatttttaaataaatttaatatattagttgtactttgaggcccttatattctgcactgctctgttctttttcataagaaataatagtgtgcatatcccacagagcaagagctgtaaacctaattagacagatttgggatcaagaagacatttaagagatgaatgtgtttgctaatttttcaatgatggtatagaatctaaaaattatctcattttaagtttcaaatgaagaattgttttgcctcataaagacactcacatgcagtctgatttactcttatctgactttttttttttttttaaactctgctaatgaggtttagtggggaagaaatggctctctgcagaaactgataaagctacaggcaagagggagaatgccagaagcttggcaatacactaaaaagcatttctgaaattgtgtcctgcttgattatctgatactgtagcagcatccaaagtggcaacaaagaagagggacagatggcaggaagcaaaggtggcagataacagtgctaataaatttcaatgttatcccttgtcatgggcttgtttcccctcaaaattcctatgtgaagcccctaatgcccagtatttcagaatatgaccttttttttggagatagggtctttaaagaggtaagtaacttagaatgaggtatttaggctgggccctaatccaagatgattgattccttaaaagaagaggacattaagacatacagagagagacacacacaccagacaggcctccatgcagagtgaagaccatatgaacacagcaaggaggcactgagtgcaagccaaataaaaagaccttagaagaaacaaaatctgctgacactttgatcttgtgcttaaagcctccagaactgtgagaaaatatatttagcttttgttttttgtttttgtttttttttttgttttgttttgtttttgagatggagtttcgctcttgttgcccaagctggagtgcaatggcacaatctcggctcactgcagtgtcagcctcctgggttgaagcgattctcctgcctcagcctcctgaatagctgggattacaggcgcatgctaccacccctggctaatcttttgtatttttagtagagatggggcttcaccgtgttaaccaggatggtctcgatctcctgacctcgtgatctgcccccctcagcctcccaaagtgctgggattacaggcatgagccaccacacccggccttatgttatttaatccccccagtctgtggaattttgttatggtagcctgagcagactaattaatgtacctgtccctttctgtagaggatacagtcattcaagaatccactcaccctgcttagaacagatgaatggcagactagaaggcactggattggatcaagaaattggagggaccaattctatcactgaccaaaaaagaaaagaaaaagtaagaagtaaaagcaactccttttgcacatactgtctgaattggtccaattttacactgctacaaagaacttcctgagaatgggtaatttacaaaggaaagagttttaattgactcattgttcagcatgggtgggaaggccttaggaaacttacagaatcatggcagaagactaagaagaagcaaggcaccttctttacaaggtggtgggaaggagaatgaatgcaggatgaactaccaaacacttataaagccatcaaatcttgtgagaactccctcactttcacgagaaccgcatgggggaaactgcccccatgactcaattacctccacctggcctctcccttgacatgtggggataattggcattacagggattaaaattcaaaatgagattttggatggggacacagcaaaaccatatcactgtcccagatatgaatcttattatcactttattcacataatttctaattgtctttttacatcacctagtaattctcacttgatgttagcttttattaaaaaagcagaaacatgagaagaattttaggtatggcagcattggatttgagtctgagtgcactaagaatcatgttaacagctgtaaaaacctggaatagctctgatcaataccctaatagtcaactagtaaatatgggcgaggctattagtggttattctttgtagccaccggattaatgtggttatttctcacaattcattctgagcattttatacctccagcagtgaaataatcattgggtataaaaatggcctgtgtgaagctttctaattttgtcctcttctactttgactggtttcatatgtgatgattgcccactataaataaaggttattcattctttaatgtaaaaatatacattactgttagtaaattgatttgaaatacataagaatttgaaatttaccttgaatttttcaaatgctatattttatacatcttttatgattgaatctaaactacttgacaaaacttgctcacaaaaaaggaaattatgttaataagatagcctatttactacaaaagaatatgcagaaagtaggggaaataaacagaagaaaataatcaagtacatagttatccataaatagaatataagtccacataatacaatttgaaaatgttagattgtgcaagtttttgtaaaagctaagaccaattaaatgctcacaaattagaataagacagtgggaaggggatctttttaagaatgtattattgttaatgatatatatatcaaagatatatatatcaaagatatatatatatcaaagatatatatatcaatgatatatatatcaaagatatatatatcaatgatatatatatcaaagatacatatgtatcaatgatatatatatcattgatatatatatatatatcaatgatatatatataaaaagatgcacaaacattaatcacagcaacagcatccaactcatatgagtaacagtggctatggtaacagtgttgatgttttttgcccactgccactgggcatgcccacttgataaagcttaaactcccagagctttccttcagtttcctccaaactgtggcttaatcttaaattttggtgtttgtactcaacatccaactcctaagtgttggtgcagttatgttgtctggtactcagagcagtttatgagatgagttttaacttcagctctttatcctttttggttcatttattttggttttctaagatttgatataaaactacccactgaagtattaacccattcaatattcttataaaaaattagttttatgctttaataagagagcattttatattgcttaaaactaagattcttgcctaaaaagtagcattgataatttgctatgtgtaagattctatgacgtagttgtttttatgaaaggtatgtaattctttatgaagaggtatgtaattcttaatcttaataactttgtggtttggattgggagatcaaataaaatggcttggacttttaataaaaatctaacaaagatacaactaaaaaacatatgttacatacttattcctaacacgtggaaagtataaactatacttgcagtgaactcacaagagatgtcttttcgttgtgactgcatgtgagaactttaataaaaatagacttgaggcatgtaggtagagagggtgtgaggaggccgagttctgtcagggaattgttaatatcttattcatgttttgtgatcaatgtatgttatatgatgtattcatatttagtagacatttgctaaatgaatgaatggatgaatgaataggtagatgaaataatggagctgatttaccaatagtggaaacataaaaccactaaaatgcattttattttttcaatagacagtagactactctttatatatatatttttaaatatatgaatacataatagttgaaaaaatttatgaggcacatgtgatattttgatacaaacatacaatgattaatgatcaaatcaggggacttagaatatccatcaccacaaaaagttatcatttgtttgtgttaggaacattctaattccaatctcctagttattaatatattgaaatatacagtaacttatttgtaacaagagctgccctattgttctactaaacactaaatcttatttcttctatctaattgtgtctcagtacttgttaactgaccccactttatccctcccctactaccattcccagcctctagtaatgatcattctactacctccataagattactttttttagctactacacagaagagagatcacgtgaatatttgtctttctgtgcctggcttattttgctcaacataatatcctccaattccatctctgttcttgcaaatgataggactgtttatttatggctgaataattttccattgtgtactacaatatgtaccacattttatttatttatttatctatccacacatggacacttaggttaattccatatcttggctactgtgaacagtgcttgcaacaaacataggggttcagatatctttttatacagtgatttgttttcttttggatacatacccagcagttggaatgctggatcctatagtagttctgttattagtttttggagggacctcccttcatactgttttacatagtggctgtactaatttacactcccaccaacagcacactaatctgtttggattaaacattagtagatgaatactgagtgctaacgtcaaaattgtaagatgcagccataggtggagggaaatgaagaaaatatgtagggatttttagcggtatcaaatggtcatcagagagtatttgaaggtagttaatcttctacttttggatattgaaaattagaattgaatctgcaagtaatggaagtcaattgaaatgtttttgaataacctatttgtagtatatgataaataatcaattcttttgattacaaacctatgatttaaagtcttccttatcatgtgcttttgacacattcagaaaattcacataattattttctcagataaattattcctttcaatagagttttaaaagtttataaagttagatgaatttccaacattaggaagttaactaactttcaacaggcattgatagcaactaataatttacactaactcttcaacctgacttaaaatgactgatgtattccaattacctttcctttgactgtcttaagctatatacattcatatatatagatagacacacatcacaatagtcaacatggttgatctcatgcgcacacacatatgcaaattttctttttccttttttgtgggtttgtatttttctgatttgtttgtcttctctgtcttcttaaaacatgttttatattttaaaagccctttactgtgtttcctattactattacaattttattactttttgttgatgctatgttgttattttagtcatatgtttgatacttaatattattcacatctaactatagatcatttgaaaacatggatcattaatgatgacatgtttagtataattaactacattaagtatattgattcctatacctctaatgttagttttaaaatgcagaaacattctatagttgcaccctaaaaaagaataagtagactttagggcttgaagttatatggtcttcagttttgtgtaagtattttttcttatcaccatttaaactctttcatgtattttgagtttcatgattttatacttgacaggtacattctcctccatacataggcatggaaaggtgtgccaatcagaaagcaggaataaatgtatgaaactgatgatgcctttgatgccatgcatgcagtactccaccagacaaaaatgaaaacacatcaaacaccagatgacaaggtaagttaacagaagtacttctcaatgggaagggattaagtttttcttctgaagacccagagtgatggctgttttgactcctggtatcaaaacgaccaaactgaataaaagggtcaaagtattaaatacgtactcatttcatgttcccaaaactgttaagttcatgcaggagaactttagccataatttgaatctgaaggacactattgcagtttaaatatttctcaatccttcagtaaatgataatattcaagtaagtatgtgcctaccttctcaaagatagtgcttgtactttgtaaatgtccaatagtatgatttcctatgagatacatgagattattactattgacaccaccatcatatgtaggtgcatagagccacactttgatgtttgacctgaaggagaaccaaaaaaaatgaataaataaattttagaatgtttattttgtcttcaaaatttatgtaaagatgttctggtgggatgttgtttgaagcatcacaggatcccttctgctcgagtttgccattttcctacctccaacactcatatttgcttatccatacagtgatgttattacaaatttaagagtagccaaaacacaatggcaaatatttgccaaggtaacttgtctggttttctcataaaggtacattactattaagtctttacattacaaccatactgccactgaatatagcatttaaagcgaaatgtataaaaagagattaccattctaatttcagtaaatttgatatataacaaataaatataatagaagcttttgaacaaagctgaataaatacaatagaagattttgaagaaagctgtttctgatgtaataaatataaaattaactatgaaatcatttcataaacatatctcataatagcagccatgtggcttcttaattagaatataaaacattaacatattaataattgaaaaaatcattagctttctaattgaaaaaactgtaaataaagattggcacttttatgtttcacattgtttttaaaacgctgataaacatattttcatagaaaggtctatatacaaaatatcttaaaacatgcaaagtttgtatattgaaataacttttcaggaaataaattttctatttaaatcatgaatgccttctgtggccttaatgtcaatatctttaagcatttcttgagttgatttacatttttaacacaaatttattctgaaacatatataatacctgtaaaaaattttgaacaactgacttgaaaacactcttgttgtatcacttatttcctgttgttatcaaaataagtaatgaactggaaattgcatctgccagtataataaatgtattataccaaaaaggttaacttgtttgaataaaaaattactattataaaatatgttggtgcacaattctggacctatttaaatttatacatacaaatattaataatagtaatgattttaagtgcaaaaagacaaagctcataacagaagttgatgaaggacataagacatttcaggtaatgattttcataataaagtcttatttttacactggtttactaatttatcatacaaacttggaaaaaccttatcatgtactgtgcacataagtgtcattatttattgaaaaagagtgaatgaataaacaaataaaaactgatgaagaaaatttaattagggtaatgacatattgacacctattctaaattctcacacattgattattaaatcttaaagaaattcctgtttttaaattatgaaataaagtgttttttgctaatatttgataatgctttattttccttacttattcaatgttgtgtttcctcagaagataatttaagaatgtaaaattcaacacattgagtaacagggaattgtttggtttactctacactgtaagctgcatgtgtaccagatagttatataaaattacagcttttgaggtggaggaatcaaaatatcttattttttaatacttaaaacacataattggtctctatataagaaacactagatcaataaataataaattagtgttttcttgtttttggaaaacaataaggaaataaggttaaacatttttaatcattgcccaaacattttcatttcatttgatacatagtatagtgttaaactcatttgttaacacataatgatttttttcctctaattcaaaaatgatttttcgtatatatagaagtaatgactggttttaaaatttatattactaaatataataatgtagtgttgaaatatcagtatatgtaatatacaatggaatttcaaaacctgagacatatttcagtcctcatattttcttgtcaatttataggacaccttttcagctatataattattaatataagatccatctaattataacataataacttctttgctatagcttatacatatatatcaaagcatatttataaggtaaacaaactaaaacaagcatataaatatgtaataatattttataaaacacttcaaagagaggtaaagaacatcacacaccggggcttgttgtggggtggggaggtggggagggatagcatgaggagatatacctaatgttaaatgacgagttaatggatgcagcacaccaacatggcacatgtatacatatgtaacaaacctgcacgttgtgcacatgtaccctaaaacttaaagtataattaaaaaaacacataagattaatgtggtgataaaatattacactgatgataaaggacttttttgagagatcaataattgtccaatgagaatcaagaattgaagtatgtcatcaatgtttttttctaaaaatatactttctgaaaacttatttgccatacattacgttaactgctaagcagcaactaaaaaatatattatctgctcctcaagagcataaaaacaaggaactaagtatttgcaggcatacacaagcattttgaaagggccatactacataccaaaagcatcataaatgcattttgttgaagaattatgaaagtaatgctattgtgattgaaaacataatctaatgtttaaaccacaatttgatttagcaaaaaataaataaataaaataaagtaatgggagattcattatctagaaacatgtacagtattttttcaataatttaagcatatttttcattttgttgaaaggtaatttacatagcatcaatgtattaaatcaatttgaagaaatattaaacagaacattttatttttctatcatactaaattagaaaattagatttgtagcttatatttctaatattcttaattaaatatacctggtttagatattaaacatactggattagaaaaaagtgtgcaataaaatactgccaaaattttactacaatgattaaaatagttcaatgatctacacattccaaattttttttcaatttaactgagagaattgtctcttatcctctctgaagaggttttattgtaaattccacatttttgcttctgaagaaaaaataatttcttcactgaataaatgttttaggttctgattttgaataagatgaagtaactcacagcagatcaagaacaactgaaaaatgcagatgaaaattcaagaatagtctctctttaaaaataagatagctacattttcttaatccagtctatcattgttggacatttgggttggttccaagtctttgctattgtgaatagtgccgcaataaacatacgtgtgcatgtgtctttatagcagcatgatttatactcatttgggtatatacccagtaatgggatggctgtggcacatatacaccatggaatactatgcagccataaaaaatgatgagttcatatcctttgtagggacatggatgaaattggaaaccatcattctcagtaaactatcgcaagaacaaaaaaccaaacaccgcatattctcactcatagatgggaattgaacaatgagatcacatggacacaggaaggggaatatcacactctggggactgtggtggggtcgggggaggggggagggatagcattgggagatatacctaatgctagatgacacattagtaggtgcagcgcaccagcatggcacatgtatacatatgtaactaacctgcacaatgtgcacatgtaccctaaaacttagagtataataaaaaaaaaaaaaaaaaaaaataagatagctgcctaggtaaccagagactgaggggccaagttgctgatgagtaggaagcttcggagtaaagaattgattttattgggctcattttctcttgaatcttctccaaacttggtggaaaaaccactgaacatccacccaaagattgcacacaggagggagctgcttttacaatattaaagagctagaaagacaaattgaagatcagacctgtaaagcaacgaggacttgagtaggcaagatattggaagaaacaatgaactgaaaacttacaagtgattgggacattgcagagcaatgggaaggttaacttctttaatgccaatgcaaatgggaactgaaattgttaaaattcagtatctggaacaaataattttaaataataaaaattaaccattatagcatataaattaaatcaatgtataagcatcaaaattgctttgtttaaatatttctgcaattatgcctgaggtttaaaatcctgtatataaaataaacaaccaagaaacattcataattcagttttaaagacacaatgtgtttgtatattttaatattataacagcatgtttttggactgtcctgactttttctgcttgaaattattttaaaaacttttaaagagtatcgtaacttgctatttgatatagtttggctgtatccccacccaaacatcatctttaatttcagttacaatagtgtccacgtgttgtgggagggacccagtgaaagggaattaaatcacgggggcagttaccctcatgctgttcttgtgatactgaatgacttctcaagtgaattgatggttttgtaaggagcttttcccccttttctcagtactcattttttctcctgccaccctgtaaagaggtgccttccaccatgattgtaagtttcctgaggcctccccagcaatgtggcactgagagtcaattaaacctctcttctttataaattacccagtcttaggtatttcttcaaagcagcatgagaatgcactaatacactatttgcatatataataataatttttgtcttatcattatttattatttaataaataaataaatatatatgggcattcagacatttctgagccttcactttgaagctcctgactgagatcttggatgaggaaagaaatatctgaaatatacaaccacattaaatgaaaaaacacttgctgaggctccttctatatggggtaatcttgtaatttatcaaacaaaacaggatgagagtaaaagaatggctatttattactgtgccaagaaatcaggaaatcaagcatatactggactgtcacagaaaacatggatgtataataagctttcacataatcctctgtgacaatagaacattaagttcacaatatattggtccataaagattgattaaagctgattctaagagaaaatgaaaaagctgattctaaaagaaaatgaaaaagctgatggggaaactaagagattcatcttgaaactgcagaaagcacaattacaaatctgtagaagaagtgtttttatatatgttgcctctgtggagacatttttatcggtaaagtcctctttgtaaatggagcgattaatactatgtgctttaaagaattagactcaaataatatctttcaatgaatgttatcaaattttctctctgttacttagttcatttttatgtaaatcttaatataaatcagtaacacatcatatagtgttaatgggtcatacataaaaattttatctctcctcattttataagtgacatacaaaattgtatgttttcttcagtaagtacccagattacaattttgctcaaaatataaaaattgtgaatattaaatagacaatatagttagtattacaaaatatttataaaataactttgggaaatttgtcaaaattagacctaaaattctaaaagtccttttaaagaaatcatgaacaattaaaatacttggacacctttcacatttgagagacctgcaccacaataagtcaagcaaatttctaagtctctgcctgccttaaattcttccccgctgagctgaggataccagaggttgacaactgtagcctcatcctgcagcatctgtgctaagtcagtggaagctctgcttggcaagactgaaacaccaccatctgtaggaaggctgttactctcactctggaatgtctagtggaattgtagaattacatgctatgatgatataaaacttcctctcatgtgtgggttggcaatgtgaagaaatttcaaggacaatccccaaaatcaattcaattaaattgaatgaaatatttgatctcttacaaatttctcaactttgtcgtgactggaaagtacatcacaaagaacatcaaaaacttcattgtgcttaaaaataatcattatttattcatgtgaaaatcataattataattgtgtgaaaatgaagaaattttttacctgttcttccattttatgcaaacatacattatcctacagtttgtgatacacattaattttaatgtagtaatatcctagacctgttaaatgaatcctaattactccacattctcatgaaatttacaggtcatttaaataaacatcctcaattctataataaagattgagaattagggaggaactgatgaatttcataatcaatttaaaactattccctctctgatttatactcatgaatgtgttgttaaattttcaatgattagtcctcttgaggatgagggaaaagccctcattttggggatttgttgattcctgtggggcaatacttctgtcataacttaatataaactatgtaaaagttaaatcatttcctcctttattagtctgttctcacactgctagtaaagacaaacccgacactgggtaatttatgaaggaaagagatttaattgccttacaattcatcatagctggggaggcgtcaggaaccttacaatcaaggcagaaggggaagcaagcacatccttcttcacagtggcaggaaggagaagtgccaagaaaagggagcaaagccccttataaaaccattagatttcttgagaactaactcactatcatgatattttacttactatcatgagaacagcatgagggtaataattcaattgcctcccactaggtcccttctatggcacatgaggattacaggagttacaatttaagatgagatttgggtggcttcctttttctattatcatgccccccaatagttcctaattgtcaatatattttttctctatatttttatttttatacaatattggatgttccttcaaggaaataaccatatgcttgacattttttgcattttttccaacatcttcattagtatacagtgtgagttataacatcacatttctgacggtgataattaccaaatgagaataagggtctccttgttctatattgaaaatctacagactgtacttttagcaaatgtcttgtcttggaagacttcgtggaaattgtccaaatgctcactacttacaataatcttttctagcccaactctaggattaggcataaatgcactgattattccaggagaaaagcagatgcttccctaaccacagatattgaactggtaaaagaaagtggtgcgtagcttctaccatatcatattgctgttatatgttagacactaaacccaccattaaggagaccagtgctttgttaatctttcagctcaaatgtcccacagcctaatgatttttgtcttgctccttgattcaacctgattcagaggccttactttgccatattcctgtatatatgaacagtgtgctgtacatcaccccatctccccagagtgatggagcgaaaagaatcctaaacctctcttggtgattattggcttatatgagtttcccctttgtgtactgctccagaagtcttgatataggtctgatcattatccatgttttaagacccctagtacagtgctctgggaagaattttatctatcactttgtatgggaagaaatccttatgtgtgttacctagaagctctattcagctttgatttggaaaaaagttaaacttctacaattactttaaaacactttacatggccatattaagtagaaatatttctagagaatgcatattacagaatgtattggatttaaattgcctgtttttttaaaattaaaatcaaatgtgtgctgatactagccattaaccttcagaattaggcacagaactaaagacgtctggaaaagcaaccagcctaattgtccatttgccttgccatcttaacattaactttgcaaagtagcttattaattgtcagacagtatagagcagtgctcatgaaatgacatgctctttcactttattcccttgtttctgaaatttattctgtctgccttaatggtttattactttctcccaaagaattaaacaaatatgcatcaattggcataatttgacacttgtttaaaaaaagacattcttggaatggagcatgatattgttttttcacctcagactggctttagtgtatactcaactttgcaatatggttaaaaagttgtatcttaaatgagcacattatccttggttttgtcctgtgagtaaagtcctctgtttggaatgtgttctgttattggacctaaaggcatattttcttaattgctccatttctattataacatatttctgtttctttggtccacaggatatatttacatgtcctgaattactgtaattactcagccactatccagctaaccttttatatgcacactctgcacctggatagtttatttgcattttaggtacacctttccctcccctgctgctgtaattgggacaaataggacttagtatcaccaaggaaaacagtcattctctttttccccacattaaatactgttcccttaaacacttcagtggaaaccctgtctctagagaaatgatatttttcacaattatttgaaaaatgtgtttttctgtggttggcaccattatttgcttgtggcttttatccaggtaaatgggaaaataatagaaagactgactgacagagagagagagagagagagaaagagagatagagatagatacacagagaaagaagacagaagaagagagaatatttaaccataatgaatttatatacagttactgtaaatatgtttcttaacataaagaggagatctccaaagatttattttgctagaatgaatcttagtttaatatttatttttgagggaaataggttttaaatatattgatttaaaaaggcccactttatattttgtcttcaaagtaatttgtaaacttttcaatttagatgtgtcctgatggttgagaaagttgtgaagataccaacaaacaaaatttcataacatttttattattcattattaaaaattggctattttgttcttaaatttactttcagtagatatatgttctatattatggataaatgaggtaaataaattaagaacccagttgttgtccttctgtctatttagaatgtcttctgtatccctaactaaatcatactcaaacttggaagacactgttccaattagactttctccatacaattatacctcactgttgaatgctactttaaccttccctttagctggggtcccataccacatcaggcctccagttgcttaatgacactagtatttatgctttagtgggaaggaatcatcagtgtgatacaataactgatatggttggctttgtatcctccctcaaatctcatcttgaattgtaatccccataattctcatgtgtcatgggagagacccagggaggggtaactgaattatgggggcagtctctctcatgctattctcatgacagtgaatgagtcacaagatctgtgagtcacatcacaagatctgatgttttataagcatctggcaattccccttctggcattcattgtctctcctgctgccctgtgaagaggtgttttccaccatgattgtaagactcctaaggcctccccagccatgcggaactttgagtaaattaaaactcttctttatgaattacctagtcttgggtatttcttcatagcagcatgagaaaggataatacaataactgatcaaagacctcagaacaagaagactctgatttttgaaatctgaatttgaactgttttgacattccctacctacatggcctcagtcacgattacatttttttctctagtttaaaacttacttattcaacaataataagtaaaacaaatgaaaacaacttgttgaccatcaaataatcctggatataaagataattaagacacagcctctgtcttcagaaagaaaataggatggagtaccatctttagacataggcaagaaaagggcttgagctgggttccagtttagtgaaggcctcctcagtctgtctctcctccatcagctcctcacagtcatggctatagcctgggggccaaggagatgtgtcctgccaacatccttcttcaggtactcaagattccacaactttttgtaaacagcccgaaggccacatgcagggaatgcataatcttctatttctgtcagttttcttaggggcaaaatgtgctattaatgtgtaccccaaagatctgagcagtggctgagagacagattggcaggctggctgctcatccatgtggttacacactaagcctctcctaagtgagaagaataaaggagatgagccatgggccaggaaatttgaggcttaaaaaattctaaacttgaacctagagttatagtcattgcaaagatataattgccaaggccaaacacaatggctcaggcctgtaattccagaactttgggaggccgaggtgaatagatctggagttcacgaccagcctgacaaacatggtgaaaccccatctctactaaaaatacaaaaagtagcctggtgtggtggcacacacatgtaatcccagctactcagtagcctaaggcaagagaatcacttgaacctgggaggcagaggttgcagtgagctgagatcaggccactgcacttcagcctgggcaacagatccagactctgtgtctacagatagatagatagatagatagatagatagatagatagatataggtatagttttcaagatagatgaacagaatatgctgtgagcagttgtgagcttgatttaacttttacatattgaaatacatgaaacacagagatctccaatgatttcttgtcccatattaatatctaaaccccaactgaactctcacaaatactaaatagggtctgattaaaaaaaggacatttattgtaatttaacctaagttgtcagagaggccactttctttttggtagaaagaaaacataatcttgatttaggcagataaatagaaagtacctaatcaaagtgtagaaactcaggcattctacatagatcctaatgcttgcatgatgctctttgggaagaaagccaagttgacatggggagaggcacctggttcaacaaagccaagctataggttttaaagaggatatagcatttagtttacttaaaatgttagaaacattatctactatggtatttatttcctttggtttggctttacagttttggtttttttgcccttcaaagacgagaaagagaaccagctttgttacaaacctatattgctgaattttaattgttttataattatttctggcaagattatataaagattatattccttaaagtagccactttaaaggtctatcaggtggtgaagttaaagggctaaacaaacaaatgcttttattaattcaattttcaatatggctgaaatgtgacatcacaatttctgtgcaatcagattaaagtcatacatctgagcttatcacaaggccttgaaattaagcaaaagagcaagaactcccctttcaatatgaggacaacaaataagaaagttaaacacatcaaagtccaaatagagatttcaaagagcagattttcaatatgaatctatgcaatagtacaggaagaagatgtagaaaaactggctaaatattctccaggctcataggcccaatcaaagacaaagatttactctcaggctacttgatcaggcactgaaatccattggatttctcagtttgaaatgaaagccaaaaccagtaaataaaatgtgagagataaaccacactttactgctgaaagtttaatttaagcaatatttgagtgtgtgtgaaatataagcttttagatctcttctttaacagattttatgaattgcccattccatctctatctcatgaacatttcatctattttggataaagtatggcttaaaacattagtactaactactgtcagtattttgtttaaaacgtagcacgaaacaaatattcaaaatcaaggaaacaaaaaaacaaaacaaaacaaaaaacaaatattccctcaattcctaacaattgagagtaggaagaataaaacataaagtattctgctttttactttccctgtgagtaattttctttaaaatcccaagtagaactctgaatttaaaatcattttgcagcaaatttcagaattttgttgtttttttcagtatagtccttcttgtcattgtattaagtttagttacattaacttataccttcactttaaagtaacctcatacttagatctgagcccataacatatacaatatatgacacaaatataaaagaaagcaagaaattgtttaccacaaaaatgaggagaatagttaactttagggaggagagcattgtgattgcaaaaaggcatattgcagtcttccaagattttggaaatggtttttgccttggttgcacgacaatttgttttataattaatgcataaaatgcattgatctttttaattataagaatgctaaaatccattttgtctattaatgataaagtgttttcaacaggattatagtctgactctattaaagactagacggtatacttaacttacatcttgagttcatgtagattttgaggagatattattttctctcttcatgaatttcccgagcatgttcactccatcaagaataactgccaatcagctaaagtttaaaagaagtggttttgtaccacatccaaagaatctttcagaaatcatctagtctcatggtacagatgcaggacatctaattatgatgtgaaaaattgaccatgaaaaaaggaacatcatatagcgaccgaacaaaacctgtcattaaaatacaaactctggccgggtactgtggcttacacctgtaatcccagcactttgggaggcggaggcaggcagatcacctgaggtggagagttcgagaccaccctgaccaacatggagaaactttgtctcaactaaaaatagaaaaattagccgggcgtggtggcacatgcctgtaatcctagctacttgggaggctgaggcaggaggatcacttgaacgtgggaggcagaggttgcggtgagtcaagatcgtgccattgcactccagcttgggcaacaagaacaaaactccgtctcaaaaaaaaaaacctcttagcttggcacgttggtgcatgcctgtagtccaagctacttgggagactgaggttaaaggatcacttgagccaggagtttgaggccacaatgcaccaaaatcacaccactgcactccagcctagacaacaaagtgagactctgtttcgaaaaaaaaaaaaaaaaaaaaagaaagaaaaaaaacctttctttaataataaaatattccacaaaatattttattacagctaatcccatccttacagctgaccttattttggtacaaatttaggtgtttatatagtcgatttgatcaatattgcagtcaataaaagatgctgactaagctgccttggaggattaattttgtagtgcaagttcaataaatggttaaattaatttattgtttgatcaaattcaagggaatctattttaccttgaagtaaatcagtatatacaaaggaataaaatgcttttctctgcaacatcttctaggacatttgcactgataatatcagcatcagtttctccaatgtatttgtgtcaggaaatgggcaaggatttattgagtagacaaaatggtgaactgcagtatcagttggaaatatttaggtaaaacataactgaacatctttactgtttgaaggtgagtcttctaattatatatgctcaacaaaaagatatatctactttcctcgctctctagtatttaagctgtaggcaggtgtctgagacttaggcaatgaatatttcatgtgatatttaattgttgagaaagtgacacgaaagcacacaggcaattggaggttaatagtcaacagttgctgacttgagattcactctcactgttctgagagaaagtactcagaataaaagaggtgtctgacattactgaatgtctaggaacaatagtgataacaacagcttctgaaccagagagttcttgatgtttgagacttgatatgttctacatctcacttagttcctgagtattttgtaagtattaagtacattcttttgaaatgcctgcttttccttcagttaagtgattcactttctattgatatcaacagaaaactctgatttgtaaagcaagaaatcaaattcttagcactgtattttactctgttatgttttattgtattatttgttactgctgtaggtacttattcttttgcctgaaagaaaaatggtaatagtcacctcagttccattgttacctctttgtacatagcttatgttttgtttgtgtttctctttaaggcagaactcacatttgctaggttaatggcatgtgattcattgaccttgcatcattttagtaatccaaatcgaggaaagctcttgagcaaggacacgagaaagccccaagagtcacctatattcacttgtagttaacgaagcctacagagggtagctttcactggccttttatccacaaggatatgggacatgatatttgtctcatccccagcatataaaatgatattcctgcttcttacagagtaggactaaagcagaacaaattagaatgtgattacataatagctagactaatttctaaataatttaatgaagcaattaaatttttttaatgtgagcaggtttttgccatgtgtgtgtctgtatacacacacacacacacacatacacatatatacgtatatatgtacatatatatacacagagagagagagagagagattgggtgtggctctgtcaccatgactgaagtgcagtggcacaatcacagctaattgcattgcagccttgacctccctgggcttaagcgatcctcccatctcagcctccaaagtagctggaactacaggtgcacaccaccatgtacagctaaacattttttgtatttttgtagagatggggttttgccatgttgctcaggctggtcttaaaatcctgggtgcaagaaatctgccggcttgtaatcctagagtgctgggattacaagtgtgagccactatgcctgacctatatatattttgagatagcccttgcattgtcgagtactttcttactttatacctatgataatctgcatagggattaacttgcaaaatctatttactatattcaattacttagaaagttactgaataactatcagagagattagagaagacctttggatctatactagttctgaaattggactacttattttcttcattttattcatctttagattcatgtgtaccacaagacccttaatttacagcacaactatacacggatatagatagagaaatataaaatatttctccttttgaacaaaatgagcctaaaaattttatattcagtattttattaaactatgaacaaattaaacatgcaaactcttaaaggactttacacattcagtaaagaagataaagtgtggctaataaataaatgtatttttaactttgtcagtgtgaaatttagcaatgtaataattttattatctagatgagtaattgtaaagtcgtcttaaaaattggtacagtgtaataggtctaacgaataagaggtatttttgagcaattcataggaaagaattagattttatctttagccactctaactagcattggttggtgttattgccaacatttaagaatatctattaaaaaacaaataaaaatcaaagatgagaaaagcaagagattttgttttagatactttattctcggtttatttttatgacagtatggttttctcatatagcattgaatatgatcaggcataattgtgattcaaattacttattatgcttgttaaaatttgacttatttatgacattgctaaccacatacataccttcattaagaatacaatcagcatgtagcagcttcctttatgttattatacaataagttcactacttcaggcatacatatatatatatataaaatatatgtataatatcaagtaatgaactatatatataaagtaaactgtgtgtgtgtgtgtgtgtatatatacgtgtgtgtgtgtgtagttacctgtgcttgatttactatgcattattttatttgtattattacctgtcatggcttatcctcactggttaaaaaaagtgtttatctgacaaaatgtgaatccagcttttccaatagctccatgaaaaatctaatatcctttgaaacataaattgctaatggtattgattttcactttataaatccttattgatccatagtgaattaaacatgtaaattgcagtgccttggaaacaagcagtatctttctttctaaaacaaatctgtagaacttttaattttttaaatgaattgccacagaaggattgtatattttcatgtaaaagttttcaattgttctattacacattaaaaatatatattttataacctgttttagaatacaaaaatactatatttacaaaagagtatgaccataattgttctactttttcaataaggggattggattaaaccccttgccttgctatgatttaagctacctctttgactaatgttatggtagtggggtttgcaacttgtcaagaaaataaaaagacaaaaattattagatggcattgtcatacattcccgtatatcacaataatttctattaaattacataataatagtaatgcatgaaaagctgtatcagttatacactatgacaaatttaaaagattatgatatatacattctttgcatttcctattattttttagtaaatatgttcacattttcctcctctagtttaagctttgaaatttatttggtaattaaatacaattattcatcaaagtccatacattattccaatttccataatatttacctattttttaatttcaatattctatacagagtgccactttgcaatgtactgaatgtacctcacatgtaccattacattgggaggctcacaatttcaacatacggaatttggagggacaggtggagttgaagcttttgaaagttgatgaggttataagggtggagccctcattaatggaattagtgccattataaaagaaaccccagagagctctcttatcctctttctgtcctgtgaagatacaatggaagcctgtaaactggaaaaggacccttgccagcacctgaccatgctagcacactgatcttggactccccagcctccagaacagatcatttttccttgtttgggggagacttagtctatggtactttgttatagcagccccagataagtaagacacacattacatttacttgttatgtctctctagatgtctccgcctcttgactggggcagttttgcaaacttttcttatttttgactgatagttttagtgtagactagtcagacattttgtagaatgagaattttcatgattttttctcattattatacttggtttctgacttttggagtggaacgtcatggaggaaaagcatcattttcatcatatcacaaggctgtgttttatcagcatgatttaatcagcgttgatattaacctggacaacctagctgagatggtgttgtgtatgtctttttaaacagatatatttgtatcaataaagtatctatctctatacacatgcacactcacaaacacacacaaatctgtgtgtatattaagctaaacgggagtatattctgatgcttccaaatttattctattaccacatgggtcattctagctttttctcctggtttgtctataattttccactccaacagtgagaattttgaatccttctatctaccattcatttattttattttaaaaatcttattataaatctgtcttggtataagaattgtcaacctgtaccaccatgagaacttttcaaactacagtacagtgttacatacagttccttttgcaatgtgttttacagactcaactcatttccaatattacttagatcaatacctttttcactaaccagtttcagtgagtttctttccaatattggtaatgcaattaggttcctttgtcagaattggaattctttcctgagatccatcaatctctaaaaatgtggacacatatatagatctaaattattgttttaatttgaatttcccctggtgataaataatgttaagtgttatttcccatgtgcatttgtcatttatacccttttttgatacaattttggtaaattttaaggaacgaaattaaaccagaaaaagcaaacccaaatatacttagatataatgtcacaagtgagctattgatgtataatatcataaacaaatgattttggtagaatttctggtattaattatattaaaaaggataaaatatgagttagtagtttcagttacatgagataacaaaaaaggtagccatgttaatttggtgccaaactttggtaaatttattcaaaatactctaatatgaataaacattataaccattttaagacacattttacaatactgtatctggagctatttctttaaggtcaaattaccattcagttactttcctaggagatgttaagtaggaccagggaaaagtacttacgttgattggagcagagccgttctctgccttactaatctctttttaacaagaactattaaaaactacttggccttcattaagttaaatggatgaggacaatgggaagaaaacaaaaaaagaagaaccaaacttacataaaacatttaaaaaaagagctcattatgattttttagcttagcaactcattcatatctaattcaacaaaaatattttatttctatttggtttcagatacagtataattttttttttggtttttgttttgtttcgagacggagtctcgctctgtcacctaggctgaaatgctgtggtgtgatctcggctcgctgccacctccacctcccaggttcaagcaattctcctgcctcagcctcccaagtagctggaactacaggcacccgcccccatgcccggctaatttttgtatttttagtagagatgggatttcaccatgttagccaagatggtctcgatctcctgaccttgtgatctgcctaccttggcctcccaaaatgctgggattataggcatgagccactgcacctggccatacattcttttttataagatattagtatactttgtttttgaaataataaatactagttccttattatgtatatttatatatgcatacttaaaaatatggtgaataatgactgtgtatcaggctctgttctaggcactggaagttgtcagtaaataaaggaggccaaaatccctgccttagagacatacattttggtctctaaaatgagagacagaaaataagtaacattaatacacaaaatataaatcatattagataatgatatatattatggagtgttgttttttacattgaatttttgccatgtaaatatttaaatttttacatggagttatgagaagagttaattcaaaaggtgaactccaaagggagggatttcaagtttccagggaggccaccacctctgctgagctaccactctgggacatgagtatagagtggaaggaaagagaggataaactgggccctaaatgccatctatatctttccatcagcagcatgtctaatgaccagaaacttctaagaatgatagtcactgcttcacttctttcttccaaagctcttgcaagcaacaagagttgcaatgaccagactaaatctatgctggaccatatagaaatgagaatttagagaacgtacccagtttcattcttcagcagtgaagcaacagtaaaaagtcatcatttatatttaatcttttaaatctatttaacttccaaagacaatagcaatatcatgattccataaagcataagggaattattgcttacacaacaatgacagacatactaatcctctcttcaaaacagtaaaacatcccacatagttcatcttggtaatgaactataaatgatgttcattgttttagctggcatataattctcttttaaaaattaatattttgaaattaaatattgagatataggattaactactattagcattattttatttaacatgttttatttttggcagttaaaaagggagccaattcaaaggcatcagttaatatttacaaataatataaaactgttcagatgttcatggtaggtatgtataaattcttttttttttacgactgcacaatccatatctgcttttttctcagcaagcatgtcaaataattgtgatttctcacctttattcctggagaatttgtgttattaacaatcatgcttttaatatattcttgaattttctattaattttaccacaagctttagagtagtaagaagtaaccttgattatattctgagttttaagtgtatttctccctgcctacattgtgtattgacaactcattttttcttgatagtaataattcattgtctcagtcgactagggaaatggacaaggtaagcctaatgactgccccaatttattgcttagagaatgttaataggccatggcacaggactgggaaatccaggaaatctactccaagtgaggagacacagctagaagttcaaagaagtcaagatagctagagttcataaaaaagagtacaggagaagggaaaactgcgataaaataaaatccagagatctcaaaagattcgtccagaatattcagttaagtagaaatcagtgcgtgtgtgtgaggaaactatcaaaatccagagaaaaccacctgaaaagtttagagagaacaatgcttgagacttacgcagggccggaaacatgcctgttttccacagccagagacacactctttcatatttgagaatttgtctctcttttttttcttttctttctctctccctctctctcattctctcctttctctctctcttctctcttctttctctctctctctctctctctctctccttctctcttcccttcttttttgacagacttttgctattattgcccaggctggagtgcaatggcatgatctcagctcacttcaacccctgcctcccggatttctcctgcttcagtctcctgagtagctgggattacaggcgcctgccactatgcctggctaattttttgtatttttagtagagacgggggtttcaccatgttggccaggcttgtctcgaactcctgacctcaggtgatccaccttctgcctacatttagtaattaatcttattgtaaatttctaatgaattgtaaattatttcagcaaaattctacttctcttttcatccttttgtgtaaacctgttaataatgaactcatcactcatatccagtttaaagattaacatggattgatagtaaatacttgtgaattttttcaagtaaaaaaaaagtatgctataagatgtactttcatttttgatgtttttcttctattagaaataaataattttatttctatagaagttattatactggataatattttatcttccatattacttattatttttctaatttcctagtctattttctaatttttattccacattaattataataatataaaagttccccttcatatattgattagattttctttttggtgtgtgtgtgacagagtctcactctgtcgccgaggctggactgcagtgtcgtgatcttggctcactgaaacctctgcccctcgggtttcaagcgattctcctgccgcagcctcccaagtagctgggattacaggcatccaccaccatgcccagataatttttgtatttttagtagagacagagtttccccatgttggccaagctggtctcaaattcctggcctcaagtgatccacctgcctcagcctccaaagtgcagggattacagatgtgagccaccacgcctggcctgattagatttttatcagtgacttctgtgtgcctcatggtttctaattgcgcttcagtctctattttcaactcatttacctgcttagtcatcacatctttgaggtcttgagctcacgttagctaaaggttctaattttatcatatgagacacttcagggaattttttggtcacttatttttgaaagtattacatttttaatccttctttttcaaatttacttacccttctgtcatgagattttatatttgccatattatttatttctagtcgattcatgtttaatccaggatttttattacaacatgcccagatatactgtttgctttaatatagtgaacctgtgttaacatttcccatgtagaacttctccgtttttccaccttcagaaggacacactttggagaatagtgttgcttttttttttttttttttgagacggagtctcgctctgtcgcccaggtcggactgcggactgcagtggcgcaatctcggctcactgcaagctccgcttcccgggttcacgccattctcctgcctcagcctcccgagtagctgggactacaggcgcccgccaccgcgcccggctaatttttttttgtatttttagtagagacggggtttcaccttgttagccaggatggtctcgatctcctgacctcatgatccacccgcctcggcctcccaaagtgctgggattacaggcgtgagccactgcgcccggcctagtgttgctttttaattccccttttgcttggaggtgaaaatgagcttgggaagaactcactgggagtattacatatcatatttgcaaatagggctctattttttctcttaaacattatattaaatttcgtatcgcagagcaatcaacaggaaactcacctgatttccatggccttttatttgctttcatactcaaaatagtgtcctctaagagaaaaagtgctgatttctttttctgcttttgtaggctttaaagctagtgtgtagaacaaaagaaaaaactggaggctcaaaaccaaaatttataaataaatatgtaatatttctaacatttggtaatatggaatgggataaaatatttataaccaaattatgtagtacaattggaatcacttgcctctaggaaagccttagtcaaaacagacaaccatataagatggtttaggcatgaaagtagaaaggaatgaatgatatagttttcattaacagaaacccatgtaaatataattaagcacttatttagacatgagtgccaatgcatttgtgtcttccctttgggttttaattgggtgctgatgctgtgaaccatatgtacatatttataaatagcaaacattaacttgcatactttgcagaaagtatcaccataatgctaagtataatttttattagttcaggctcattatcttaacaattttaaagagaacaatattctccataagatgctacacgcctacattctgttaaaatcaaaatattaaagaattaacatattggctgagcagtactactccagaaatgtattgagaatcgtatccttagaaattcaatatatagtggaagatgtagtagtcaaatgaaaaacatctttttttaattctctaaattcactaatcaatttagtgtatgagagaaataaatttacatatttcatgttatcaagaacattttgtaaaaacatgttcatcactaaaggccagcgtcccctctttttgaagccatctgcaactttttaatgtgtacaatcagtattaatttaaaacttatttattaatatacacacacgtgcacacacatatatgctgcatataaaacactgctttttggaagggaaaataaaacataaaatcagttactaatttttatgaatttatcatctaattgaggggagcaagataagcatataaagtgttgatgttcataaaagctaatttgtggtataaaagagcagcaaaagaaatagtatgtctaagaaaaaattataatcaagtctgtatgtcataataaagtgggcaatgtttgaactgaacatcaacatatgaagagaatgttgttacagaggttaagtggtaagagaataagcagctccaggtagccgggcactgatctgactctcactgctagactgtggtgtcctcaggagctatctggcatgcacagtcatccttcgatgacctccagttgaaagtaaacaatttcacagaaaaccagtattagacaaggtcacattgtgtactacaaaggagacaaaaagctaagcctagagaaaaaaaaaaaaaagaaggtcactcatcatacccccaaattatcaaacatttccatttctcagcttactgctgctttcttccaatgaaaacttcaacctcatttcaagttttcatctttctagatctgatggataggatacacaatcttggccttactccttcctgaaaggaaaaaaaatcttgctttcaggaaccatcctccaaatcactaaacacaaccccaaattccataagtatttcctaaaattttagtgagatgtctcataattctggtttatgattttccttgcaatgaactaccatgcccaactttgtttaaatacaagtgtgcttctagtggtcttttggctggagaacactggcagtgtctggataatattattacagcgggtgggatgcttctggcttcataaagagcttagtgttgccagttgcattactaaggatgctaaaaacaaagggttggcacagtcaaggattaaaaagagtaaataaaaggatcatttacaaatgtgtgggaagagttaagagaagagagaagattctgaggcatccaggaatagtaacatcagaaagcattcatcacctccagtcttgaaaagcagaggaagctatatttttgtcgtgtagtgctggatataagaactgcctatcagaagctgaggtcttcagcagataaatacagctattggtaagcaattgagactttaaagtattaactaactggggcacataaaagtttggacaagggtaaagattgtggagattggatctggaggataaatggagaatattaagaattaaacaaaaggggttgatttttatctatgtataattgtgagcatgcattcaggataaagttcagcatcagaaccactattttgaaaatagtgaaagagaaatgtattccttagaaacagaatttttttcatacttatcttgtcataaagtatctatccatagtacatttaggaaagatggggttggaaagcaaagtgaaggccaaattgtagaaactctcagtagttaaactacagagattaggtatcattccccaaaaaggatttggagatttcagctgggtgtggtgacttatgcctgtaatcccagcactttgggagtctcaggtgggtggatcctctgaggtcaggagttccagaccagcctggccaacatggtgaaaccctgtgtctacaaaaaatacaaaaactagctaggcatagtggcaggtgcctataaccccagctacttgggaggttgaggcaggagaattgcttgaagcgggaggcagaaattgccaagattacgccactgcactccaccctgagcaacagagtgagactttgtctcaaaaatataaataaataaataaacaaatggagatctcaacattgcatttaaagcaatgtttaaggagagttaatacggtgttaggaatggtagaaatatgtcaggtagaaacaggaacaggagtaaagtttgagaatttgagtttacagattttaatgattttgagatgtgaaggacctaatataaaatgatagcattatatgatccaaacaattacatattaaacaatttaccaacgaatttataggtgactgattagcactagcagccatggagaaggatagaattagatgtacttgaagttttcagctatggcatttgggaaatgccagaatctctacattataaaattgaattaagagaattttgttgtggaaaaaaaaaatctcacttgaagtcatgccatttataagtcaataccagtaatagttgaaaatatgacaggggtgcaaagaggttagtttaggatgaaatgagttaggacatatctctacatccatttcaagagattcaaaatgcaacaaaattgaaattatgtcagaagactatggcaaggagaagattgagacaagtaggaacaggagggaaaaaaagaaaaagaaattgagatcacacgagaggggcatggtttggaacagatacttatgaattctaaagggaagcttttaaagacagggcagaaattcaggcatatgaaagctacatatcaaagagcattaacattagtatgatacaagggtttcaaatcattttcccatgataagcaataggatgctttcatttaaaatgagcagaggtatgccaaagtggtgagatatttaaaagacacctcattttctagcagaatatagtaaacatattaagagaagagtatggcaatcagaaatttagcaagaaataaagctgcacactgatacaattttttttctcttctccatccatgtatttgtggtaaaaacatttctccatgactgtttttcctgttgtatccatttgtggacattaaagcaattaatatacctgtattacacatatttgctgcctttaaatcagctatccaaattaattggataatttctgcaaataatataaaaatgtaagaatgtgtatggcataagtttagtgaatatttgatgcttggagcctcagccacagtttctgaagcaatgttttcaaatacaatgaagttagaatcacaaaatattgagtcaacactttattttctatactttaagtaatctcccactttctgtgggaggatagtagcttaacggaggtggaaacctaattccaagttgcaaaactacttcttgccataaaaatgtgagaagtttattttccctttgaattaaaccatttagctaaacagataattactccaattgtcaaatgaatttaggatgtgtgtgacaaatggtgccatcccttccttttattgagggctagttattatttatcttagaatatatattaatgggttgtttctgcatggctatgtagaagagtgagataccctttttttctttgcagtctcccagtgagtttagtatggtgtactttacattctagcttaatgcttattcagtaataaaattgttttaataatttatattactaattaaattagtagtaatgaattattactactaataattctcagaagttaaactacagagattaaggattattccccaaaaaggatttggagatttcagctgggtatggtgactcatgcctgtaatcccagcactttgggagtccaaggtgggcggatcctctgaggtcaggagttcaagaccagcctggccaacatggtgaaactactaataatttataatacaaattaaaataatgaaaatacattaataatctaatgataaaaaagataaattagtaagaaataaatactttaaaattaaaatataatatcttaatactaagttattttcttttggtctacctatgtgaagaaggtttctgggttgggaggatattttgtttttaattatatttcccaaatcatatgtatcatgtaacacacatacacacatatattatttatttttcttcttccatagatgagtacttggagttgcacagccatattctaacagaagcatgggaaaaagggatatgatagttcaaaactttatctgaatggaaattgtcattatttctcaatttaaattatgtttatgttacagtgtagagtttttattacatgcagtatttcagttacaggagatgattgtagtttggaaatgagggagatcaggatgtataaatttgataagaaatttacttggataagtacagatgtatttaataacattatctaagacattgtgaatgtttctgtaatggggaaaaatcacaggagcatgtaaaatataaaaatatatgaaatcacttaattaaaaataattatgcatttttaataactaaataaaaccttgtgattttgtaagatgtcaacttgtatgtagattatgagaaattttttataataaattccttccactttataattacctacacagagtaaatcttgtccaataatctcttttatcacttaataattattctgatgatattagtagggtttatccaccatttcataatttctgtggggaaaaacaagctaaggtaagtgttcatgtgcttaatttttgtctcttcaaaatttggcctgactgctcttaatttttgtctgacttctaagtgatttctttttgctacaccagagcatgaataatgatagagatcaatctaggaggaagttaaaaaaccacagctttaaagtggttgactgaacctcttcaatgtggttgaaaataataatgaaatattgatccaaacatcccatttgcctttctttggtttcttccctttgtagataagagtattatacatcatgatcaagatactaaattatctatgacattttgcaaaatgattttaaaataattatttaactcttgccacataaaacaacacatactttgatggaacgccattctccttagggtgacttaaagaatctatatttggccatatatttgaggctcttacgaggttgtatatttaactttaatgcattaaatctagtttattttgtattcccattggagaataagtttatgatattaagactagccatctgatctaactctcagtttactcatttgaggaatagtgaactgccagagaatgagcttacttttgagtaaaattaagctgtaaattaaaatgcatgatgtttaagacaggtattttcctcacagggatacactgataagtactctggtctgtccttgagggggaatttctgaatatctctgggattctctctgtgcagctgtctcctctctcctaccctatcctgtgaagtttcacctctcttatttccagaacacccagctattccccttcaacgtagggattcagtgaacctccaatttggcccttcccacctcccctgccctcaccaccactaccatcaccaagtgctgctccctcaaggtgttaagtaagagcaatcttagagctcatctagtttgtattatcaatcactgtcattcattgcgtgatgtccattgtcttctaagccattggttcatgtattttattttaatttcctttgtttcattgttttggttttggttgtttcaggcaggaaggcaaatcagctctctgttactccatattggccaaaagtgaaagttatttgctattattttaattggaattatgatggataaatagatcagtttgggaaaaacagatatatcaattggattgtgttctctaatgtataaatacggtataattttatattgatataggtctccattagtttattacagtgatgttttctgtctttcgaggtagaactgcagtacgttatacgttatatgtacttatgggtattattatcttagtctgttcctgctgctataacaaactatcttaaacggagtcatttataaacaggacaaatgtattgctcatagttatggaagctaggaagttcaagatcaagccatcagcaggcccagagcctggtgatagccaggtctagttttggttttcaagaagtcaccttgctgtgtcttcacttggcagaaggacagaaagccaaaagggcctgcctaatttcctccagccctttcataagggcattcatgccatctatggagcctctgcccttgtgacttgatcatctcctaaaggctcatccacttaatactatcacattggtattaagtattgacatataagttttgggtagacacattcagaccacagcaggtattttatatctttgaagctgcagtgaacgttttatttaaaagaaaacaattttttattgtttattgtcattatataagatgctaatgagttttgcttctgtggaattgttatattctcttgttaattctacttgtttttgagcattcattaagacctcataaattaataattatatctgtgaatgaattaagatattgtaactcttgctttgccaatgtttatgaaatattttttcctcttgccttactctactggcaagaatttacagaacaattgttgactagaaacattaataatggatatctttccttttctcctttttttttccttttttttgagacagggtcttgcactgtctgccaggctggagtgcagtggcacgatctcagctcactgcaacctccacctcctgggttcaagtgattcccctgcctcagcctcccgagtagctgggattgcaggtgcatgccactaatcccagctagtttttgtattttttaatcagagatagggtttcagcatgttgaccaggctggtttcgaactcctgggcccaagtgattcacccacctcgatctcccaaagtgctgggattacaggtgtgagccacaatgcccggcccccttttctccttttcataggaagatgttgtttagagtttcaccacaaactaggatataactaacatttcttttcataggctatttttttatagaatgaagaagtttacttctgttatggattgaatcatatttttctaaaatacgtaagttctgatctctagtacctcagaatgtgacctgattcaaaaatatggtcattgcagatacagttgattaagataaaatgaggtcccatgcattaggtttggcccctaatttgtttacaactagtatatttataaaaagggaaatgtaggccgggtgcagtggctcacgcctgtaatcccagcactttgggaggctgaagtgggtggatcacaagatcaggagttcgagaccagcctggctaacatggagaaactccatctctactaaaaataaaaaaaactagctgggcatggtggcgggcacctgtaatcccagctactcgggaggctgaggcaggagaatcgctcgaacccgggaggcagaggttgcagtgagcagagatcgcgccactgcactccagcctgggcaacaggagcgaaactctgtcttaaaaaataataataattaaaataaaaaggaaaatgtagacacagatgtacacatagggagaacaccatgtgaagactgcagttattctcccagaagccaaaaatccaccagaatttaggaaagatgactgaaatagatccttctctaatatcttcaagggagagtgcctctactgacaccttgatttcagacctctgacttccagaattgtgagagaataaattactgatgttctaagcctcctagtttatgataccttcctaaggcagtcctggaaaaccaaaacaacttctattcccagttttctggagatctttttagaatcatgaatagttatatatatataattatatatgagtatacaattatacgtatattttaaatttctctgtttctatgaagcattgtttttatagatttttatgtttaatgccttactattcatttaaagtgttcagattttcattgctaatatttgtgcaaggttctaatatcagtgttttctgggcatataaaaggagcagagtggaactctcattactgatttcctgagattgttattattttattatctcttcttacaatgtttaatagaatttagcagtgatgtaaactaggtatgaaattttctttgaggaacagtagttttgaattacaaattcttttttaaatagaaaagtgctcaaatatcctatttctttttgggttagtgtaagtaaagtggtgtattacaagatattgtgtgtattacaagatttttctctattacatctatttcgataaacttattggcattgagttgtttataatattatcttaccatcatttccatgcattttcacactcaaagattggtatacactattctgtatgtcattcttacattaccattataaagtgtcatcactattattaatcttttccaaaaaacaaattctaattgttgttgactttttctattttattgatttctactcttttactattttctaccttcttacttcttactttggttgacttagtgtttcttttccttattttcttttttttaatatatatacatttttaattatactttaagttctagggtacatgtgcacaacgtgcaggtttgttacatatgtatacatgtgccatgttggtgtgcttcacccattaactcgtcatttagcattaggtatatctcctaatgctatccctccccactacccccaccccacgacaggccccggtgtgtgatgttccccttcctgtgtccatgtgttctcattgttcaattctcacctatgagtgagaacatgcggtgtttggttttctgaccttgtgatagtttgctcagaatgatggtttccagcttcatccatgtacctacaaaggacatgaactcatccttttttatggctgcatagtattccatgttgtatatgtgccacattttcttaatccagtctgtcactgatggacatttgggttggttccaagtctttgctattgtgaagagtggcacaatgaacatacgtgtgcatatgtctttatagcagcatgatttatattcctttgggtatatatccagtaatgggatggctgggtcaaatggtatttctagttctagatccttgaggaatcaccacactgtcttccacaatggttgaactagtttacagtcccaccaacagtgtaaaagtgttcctatttctccacatcctctccagcacctgttgtttcctgactttttaatgattgccattctaactggtgtgacatggtatctcattgtggttttgatttgcatttctcttttccttatttacttaatgagaatacttagatcattgatatatactattttctatcatagtcatgtgaagttataaattttcatctatgcattatgttcgctacatcttcaaagtggatatttcttttaaattttctatcattataatattttctaatttcctctatgttttcttctctatgttaagtttagtagtgggttatttcattttggcatgttagggatttacaaattacaaataacttgctgtaattgatttctcttttaatgctgttaaagtagaacaaactacgttttattttaaaattactgaggcatttcatgggttagaatatgacattatacagacaatattggtgagtattctatgtacatgtaaaaagaacgtcacttaggtcaagctcagtccacagtgcttagatattctccctattgttcttcctgcattcactagcaattactgcaagtgtcatgtttatatatccaactataattgtggatttatctgcatttcttcctttagttctgtcaatatttgtttaacatattaagacttttccatttatgttcaaataacatatttttattggatgtaaacatacttaaaaattgttttcttaacaaaattttataatctttataaaataactctggcaatacacctaatgttgaattctactttgtgttacgtactgaatcatgtttcctccaaattcatatgttgaagtcaagcctcagtgtaacagtgtttagagatagggtctttaagaagataatttaggttaaatgaaattataaaggtgcaatcctaatttgatgagactagtgttcttgtaagagaaagagacaccagaactaactctctctctcagcacatgcacaaaaaaaaaaggccatgtgaggacacaatgagaagttggccaactacaagccgggaagagaagtctcaccaaacactaacactatgagcatattgagcttgaactttcaggctcaggaaatgtaaggaaataaatgtgtgttgtttaaaccgcccagtctgtggaattttgttatggcagtccaagcagactaatatagtctgatattaatagagcctaacatattaatgtattaagataccattcttaagttaaatatttttgtactattgatatatcttatttaatgtttttacattttattttcaacctacctctgtttcaacctttgaagtatgtttttgcaaacaatacaaacttagattttatattcaagtataacctgaaaatctttaccacttaagtgaacttgtttattcctttactgttaacatagttgcatactatattttaagtcaaatatcttgatgttcgttttctatttatcatacctgcttcttttttagttcttttctgcttttatatcctttttattagtgaattaggtccactgttaagcctttcatctatctgggtttttgcttttattattattatgtatcctttttgtgttttactgagcctcttgaatatgcctgttattgtcttttattaatttctaaaaattctagcattatttccctcaaataattactctgcttcattctctacattcacttcttacggggactccaattttacaaatgtcataccttttgatattatccgacatttcaaaagcattttgtttactgttggccagtgtctattaactgtttatgttctaactttgtatgtgaatctgcaattatctgtgctgcttttttttttttttttttgagacggagtcttgctctgtcatccaggctggagtgccgtggtgcgatctcggctcactgcaagctccacctccctggttcacgccattctcctgcctcaacctcctgagtagctgggactacaggtgcctgccaccacgccctgctaattttttgtatttttagtagagacagggtttcaccgtgttagccaggatggtctcaatctcctgacctcatgatccgcctgcctcggcctcccaaagtgctgggattacaggcgtgagccacggcgcccggccagaaatttattataattactcctacattccgggtgccgtgactcatgtctgtaaactcagcactttgggggtccaaggtaggtggatcatgacgtcaggagattgagaccatccaggctaacacggtgaaaccccgtttccactaaaaatacaaaaaaaaaaaaaaaattaggtgggcatggtggcatgcacctgtagttccagctactcgggaggctaaggcaggagaattgcttgaacctgggaggtggaggttgcagtgagccaagatcacaccactacactccagcaccctggtgacagggtgagactccatctcaaaaaaaaaaaaaaaaaggaaaaaaaaaagaattaactacttgtttactgaactcatataaaataagcaaagagttattaaatatatatttaagtgtaaaccttactccattgttaaattctgtgatgatttatcttttttttacattttcagtgggttataatttctaaggaatttatgtattagtattgataaatgacatacttattttgtttcctgtatatttgaccatgaattactaatagctttatcttttttttagcaaaaagataaaatgtgaaggaaaaagaatgaagtcttgaggagatgatcagatgcctttgaaaaacaaatacttaagagcttgaggaagcttcaaataaatgaaagctataagaaaactgtcggtgatggaaggtagactattagagaatgaagagtgaagttgctcaggaaagagaattggtgaggcttcaagtgacattcgttctggaaagtcagtggtagccttgaagacatatgatgactattttacccttggagatcagaatgcctggctaggaccatcctggtaattcatcattattaaaaaagtgcaccaatttcatcagtacggataattcaagaacaaatttttaaaatctggaatgttctaatgtaagacaagcatgaaatctcagggttgctttcattcaataaatgaattataatcatttattgagtacatactatgtgcaaaagtgctatgggaggcaggatggccttatttcagggtgctccccctccaaacacaatttagtacttgcctgtgatacaggataggtggggctgtggttttattttatttttgtgtttgtttgtttgtttttgagacggagtcttgctccgtcgcccaggctggagtgcagtggcacgatcccggctcactgcaacctccacttcctgggctcaggcgattctcctgcctcagcttccgagtagttgggattacaggcacccgccaccatgcccagctaatttttgtactttggtagagatgagggttcaccatgttggccagactggtcttgaactcctgacctcaaaggaccaacccgcctgggaatctcaaagttctgggattacaggcatgagccactgcccccagccagtgctgtggttttaacttggtatctacttcatcgattatttgagttttaaactaaattccagaatacaaatgtcttaataaggcaaaaatatacaaatgattttaccttccaaatgactgggctttaaacagtacttatacctcttggttcttttatttttaaacaaagattgtattgggaagtattttctcttaaaattctaattcaaaatacttgtgtatttgaaaatattaaggaacaaaactcatctttgtgtatgtgtgtacacaaagacttctaattaacaagggcagtttaaaaatacccaagtctctgggtgaaaaagcaacactgggcatttgccttacaaaaagcagcttttagcaaaatcattaattaccctcctaaaacaatccaatgtcagctctagagcacttattttgaaaaatatttcttagaagtatcactgttctaaaactatgatgtgtacatatacataagtcatagctacttgtaatattcagaagtatctttcctgggacaacaaggcctaattttaaaatactgctttataaaaaaatcaaatattctttcacaaatatcacagaggtgattcaagcaataataaagtctattttaaaatgtaaattaaaagcatcaaatttttacatttgctaatgactgttctgtttatatgcagtccatgactacagtatgtatttgaaaattaaataaggctatgaggtttacaaaattttattttaaaagccatatcaaatcttaaagtaagaaagtaatctagtaattcctttaacaataaactagaacgatagactactccctggaaatacattctgaaatatttgctacaatatcttacctttaactgcaatttctcctttatacatgactaaccatattaccttgatgaaaactatggtttaagcataaggataatggcatcctaaaataaaatgttgtgacatttgtttgatgtttttaatattgtatttattaaaataactattttgacagtaaacataagatttctggatcaaagaaagattatttacttgcataatatcttaatgacagtcctcatgccccaatatctcaataacataatgagattcagatgtcacatacatatcctatatgggggtttgcatcacaggaaactctgaaattacaaatctcacattttatgtagggcaggctgtacaactcccattttgtcctcagaaaaaggaaaaagaccttatcttcctaaaataaatccttactatggatcagagggggaaatctttaagttcattactatttgaaatgtaaacatgtggccccagggaaggaaaaactgtaaacctctactaagaaatacgcagtctcttaactttgaactcactaactcatcctttaaccttagttgccagggatttttttttactcaaattccagaaggtgaaaaaaataaaaaattcatgtggcattgcttcttgacactgatattatgattgaaagagtaacatggccttaaattacccaagcaacacaaacaactacaaaaatagacaaaatatagaaagcatccatttttgacattgtagaacaggcagcacagaactgtgatccaggagaaggaaaacaaatcaggtggggctcctaggctttaaggtgtagggatcagatgttctgtagttcaggaagggagaaagccaaaaagggctcaacattctcaatgaattgatgaaacaaggatcagcagatgaaaagactaaggtactaataatttgtggaatagagtttcttagatgaggtgactccaagagaaggaatctggaaatatgaataagaatccccttgggtttttcagctgcccacctatttgagaatgcattggtgaaatactatgaggcctagacagggcatcttttaggagaagaacaattagttctcagggagctacaagttaaaaaaaattccaagagttcacacgaagacggtcagtaatgaaagaccattttaaatacacagtgtgttcatcagagatctctaactggccatacctaagaagtgtggttaattaacccaagagtaaagtctattctgaacctgtcctaagagcacttaccaatatacatttaaggattcaaactgatcttcaagaatataactttcagaaaaaattttaacactatttaaatgagtaaaacaaaatccaacactcaacactgtataattaacaatatctgatacccgcaacaaataaacaagtagaaaaaaaataaccaggaggatagtcactcaatagaaacagaaacagaactaacaaatcagtagactagtatatttaaaaagccagtatatttttgccatatatactcatgcatatctgctcaatatacaaaattataaatataatgagaaagaaattaaggatataaaaagaaccaaactgaacttttaacggtaaaatgacatctaaattttaagagaactttaggcactattgaatataagatttattaagtagaagatataaaagcagaaaatatccaaaacgaagacagagagagaggaagaaagaaagactgaaagcctaagcagactctccttaacatgctggaaaaatatcaagcactcaatcctatatgttacttgagtaccagagaaattactaaaatattataaattttaccaaaattctatactcacagaccctaaagtctcaattaacccaaggcaagataaacatataaagtactacaccaaagtacgtaaaatcaaatagctgaaagcctgtaataaaagagaaatcttaaaatagacagatataaaaaacattaggcacagagaaacaaatatgtgaataaaaatatgctactaatccgaaatgatacaggttaaaagagaatgtgagaatgtgatgacattgttactatagccaaaacaatcccactgtcaacctataactctgcacccaggcaaaaaatatttttaaagtatagacattaaaaaattttcaaacaaataaacatgagtaaatatatcaccagcagacctatattaatagaaattataattaaccatgggtgacagaccacttttccccaaggttagggagacaataaggatatcccttctattcaacattacactgaaagtcccagtcagcacaatgaagcaaaaaaaaaaaaaaaaaaaaaaaaaaaataagtaaaacaaaaacggaatgaaaagaaagagacaaagttgtattcatgtgcagacacaggaacatttacatgaaaaaattcaataaattttcaaaaataccgataagtgagtttagtactgtgtaaagtacaaagtcaataacccaaatctattatgtttctgtacttcaggagcaagggttaaaaatcaaaatttaaaagtacatatcatttataatagcaacagaaaatatgaaatatttaagaaaaaatttaacaaattaaatcagctaaaatataaacatgtaataaatcactgatgagacaaactaaaaacacaggagaaatgaagagatatgctatgtttaggaatcagaagactcattgttggtaaggtgttggtttttctctaattaatatctaagcgtaatgtatacatatatattttttcattatctgcctctgtatcttattaaatatgatttgtattatgaagaaataagtgaatatacatatataatatatagattaactaatatacaattttatataataagtaaaattcattctaatataagtattaatggaaattattattttctttgttccttcctgcttttctctcctcctgtatctgcaaaagttcaagatttttgtgcacctcctctgagctatagctttctgttcgtgacttctagggaggctatagaaaattgaaaataattagaaaaacttacattgcaaatacaataaataaatcaatcataattagaattttgctttatagtcaagaggagctcaataagaactccttagtgatatgattaagaggaagacagttataatggaaaacaatgtggagattccttatagaactaaacgtggaactaccattcaatccagcaatcccactactcggtactaaccaaagaaaaagaagtcattatatgaaaaagacacatgtacacacatgcttataacagcacaatcgcacttgcaaaaatatggaaacaacctaaatgcccatcaaccaatgagtggataaagagaatgtggtatatatacaccgtagaatagtactcagtcataaaacagaatcaaataatggcctttgcagcaagttggttggagttagaggccgttattctaaatgaagtaactcaggaatggaaaacaaaatattttatgttctcccttataagtgggagctaagctatgagtatgcaaagggataagaatgatatactaggctttggggacttgtggggaagggtggaaacgggatgaggaattagactacatatggggtacaatgcaaactgctctggtgacaggtcaccaaaatctcagagaacactactaaagaacttatccatgtaaccaaaataccccaaaaacgattgaaatagaagaaaaacaaaaaataaaatacgaaatgatagttataacccagtaataaacatctaagtaacaatttctatacttaatagtttaatggaatttgattaatttgatgtattttagatttctgatttgctctatgatatattgactaaaatctaatattttatgaataattaaaaatgaaaatcagcattgaccttactgaaaatataaagaaatgcatttttctttatatataattacattaatatgtatatacatttgattttttgtagaactttcagcactcctattttcattcaagtatgattattgttaaatactttattatattaaaaaatctggaggagaatttctttacacacgccccagggtagcccatttttactcactagcccatggagtccagattagttatcacagttattatataaattatacctcataagtttacataatttaattcacttgaaaaggctttgtgaagtgttctactactagtatttgttattttcattgtttatatgtttaaatttgttatattaagaaatgaaaagaaacacatgaaacctatatttttcatttcacataataatgaataatatgtatttgtcaatattttcattaaagtacagtttgtatatattattaatttcttgtaaaagtttatgcatttaacataaattaaatatagaatttgaatatggatctattctctactccagtgctgcagaaatatagattattttgccttagtacatggattatgatatatatacaaatataattgtagaaatatatgcagaataaggcacatagcttatcagttttttcttacatacatgacctggattccaatattattttttacctaccattttactaaagaatgtaacatttgttttttgccatgtgaattaatgttctgtaaatgtccacctgaatatagaaacatatatttatttagtttcctattatatgagttgtcattaatgatttctaaaattggatactattgtgtagacagtatcaaattcttgactattatgaataatattgtaataaacatctttgtagcttaattgttgcacattttcataaatacattttcaaacacatttctagaactatggtctccatgtcaatgattatctgttttacaaagtattttaaaatagcctttatgccaactttgatccctagcgatagcatatgagaaggtccaattctctatttatttgtagcaattagtaatcatcttatttgatggatacatctattatgttgctgcaaaattaattgtactttgggccattagtttatatggtggaaaccgcaattacttttacaccaacctataccaattacaagtggtaacattttcaagcagctgcctatataaaatttatgctaatattaccacaagcattgaaaacattgaaaaccacatgcagttaatctgctcttacagggttacaatggactatttggggggggcggggaacagaggaaaaaaggaattaattactcagtggcataacctttgaaagaacacattatttttaattgacctcttggctttcctgagagttctgaagtattgaatgagaatagcttctcattaataatagtatttacaacaaaacaattatatccataattttttgtgtgtggatggagagatttttcctataaaataaaagttatgtattcaaaatatagactgtaacaaataatattttaatatatgatgataaaaaatacttaaatttctctttataaattaagaaacactattgatatgtattctggacaacagaaccctcaacaatagaaattattgtagcttcttatatttataaaatggaaaattggaaaaatccgaaatcaaaaaaatgaaataacaatacaaacataaaacagtactaaacttgtctttgcaaataaagtactatcattctttaccactaaatatttaaaagaataaatggaaacggtgactatttttattaaataagaaagggtatactgccacctagtggttcatggtgtggctcaagggcaatattttctcctccaagtattcttagatcctgctgatcaagggaggctgatggctgaatattttacagttaaaccagttaaataattatcaaaattatttcattttcatgaaattactcttaaccacgttatactttattaccttcaccttaaaagattaaaacccttaataacaaagcatagatggctgttcagaaaataaaatttcaacataataacttccataaaagcagtgaagatgaaaatgaatattttcttgtgaagaatatggtgactaatttaaagatctttcaatttatgaatacttcatttagactacctactatttgagtaaagtaataaatttaatatgttttccatgatgtaacccacatgatggaaactcaaaattaactacattaatcataatggataatcaaattgaatattaaaaatgcaattaatcttttaaaagaaagtattttttgagatcattaagctgaagaggagaacaaaaagaaacaaatagaaaaatattttcaaggaatctctttatatctatgttatgttatctgataaattattgatctttttcacttctcttctatgggtggttctgtgtgtgtgtatgtgtgtgtgtgtgtttgtgtgtgcatgttcattgtgtttgtattatataataatggacataattttgtgattgtagaatatcttcaagatgtttgagccatacatgtagagtgactatcctttctagtatcaaatgaatgacctaatcatttaaataaataattagtttaaataattagattatattttatcaattaggaatgatctgcattcagtttataatcattaaacatgaatcctttaatagtggacacgagatgatgaggttttttgattaaaacaattatacaaaaactacattatcaaaaatcaatattctgctacaaaatagctgcaatacaaaattcattgtggagcgcggtggtgccatcatggctcactgcagcctagacattctgggctcaagtaatcctcctgccttagcctcccaaagcaccaggattacaggcatgagtcactgcacccagcataatcattctctatagcaagtacagaactttttgacttgcaatgggggttattttccaataaacccatcataagttgaaaatattgtttagtcaaaaatgcatacaatacacctaacctactgaaaatagctcagcctcgcctaccttaaacatgctcacaacacttatattagtgtattattggccaaaatcatctggcaacatagtagacagtacactggagagtatcagtttacccttatgatggcataactgatgaggagctgtatctgcccagcatcctgagactgtatcacatagcactagctttggaaaaaatcaaaattcaaaattcaaagtatggcttttcactttcacaccatcgtaaagtagaaaattataagtgaaaccattgtaagtcaggaactgtctgtacagctttttatcagtgccagaatgatagcataagaaaaggagacatcaaagacacattgattcatttatatatcaattcaccaaacacatagagagcatattctaagggtaatccagtgtgctaggaggtgggggtgctacaatgaaaagttggatcaaactggcacagtctttgttctcctgaaattaattttatttggaacacagagtcacacataagaagaggagaaaataaaaatggaaagccttggatttggggaaagagacaatcatgaaatatccagagaacaagcatctagacaaagggaaagcaggcaagcatcagagaaaaaaggttttccaggcttcaggtactgtaaagagagaagggtcacattaagtgagcaggcaaatgggcaggagaaaggaagttaatgaggaaaaggaaacagggaccagattatggagggacacagagggcagataggaagtttgaatttaatttgaaagatcgtttccaaaatcctgctttcataaatgatggggaaataagattttaaagagataaatataggaaaaggagcatatttgagtaaaaggaagaaagaaaatgaattcagtgtggacaagttgaagttgaaggtgtgtctgtgtatcacattaagctgatggatgacaggtgggaaggataacgggctttcacttcagcagctgcagtgatcaaataaaaagattttttacctcttaaaatgtccctctgatgagacttagaaaatgacataaaaaataggaacaatacctatagtcattacaaagcatcattgtccaaactaattaatttaaaaggctgtaggccatgtgtggtggctcatacctgtatccaagcactttgggagggcgagatgggcagatcacttgaggtcaggagttcgagaccagccaggctaatatggtgaaaccctatctttcctaaaatacaaaaattagctgggcgtggtggtgagtgcctgtaatcccagctactagggaggctgaggaagaagaattgcttgaacccaggaggcagaggttgcagtgagccgagatcacgccactgcactatacagcctgggtgaaagagcgagattccatcaaaaagagaaagagaaggagacgagagagagatagatagagagagagagagagagaaagacaaagaaaaagaaaaagaaagaaaaagaaggaaggaaggaaggaagaaaataaataaaaataaataaaagatgtaagtgtaactttacaatacaggaatatgacagttaccaccttattcaactgaggaaacttatcgttgccaacagtgaaacaattgtacaatacaccctttaatgaatttaatgtgtaaattcacacattactttagtattctcaccagctgcccaccccccccaaaaaaaaatcagtttgctatgtgtggaaatgatcacaacagtttaaaattatagactgatctatggtgaaacagacttggatgtgtcaaaagagtgtatgccatgtaaatcaaacaatcaaagaaacagagtggtagggttgaggttggggtgtggtctggtctaaaagaaatcaagataaataaatacgaattgcttcctcagcaaaaataatgaagtcacaggcatcacattgcctggcttcaaactatactacaaggctatagaaagcaaaacaacatggtaccagtaccaaaataccaggcacatagatccatggaacagaatagagaacccagaaataaaatcagacacctaacaaccagctgacctttgacgaagttgacaaaaataaacaatggggataggaaaatgtatctaataaatggtgctggaaaaactggccagccacatgtaaaagaataaaactggactcctatctctaatcacatacaaaaattaactcaagatggattaaaatagttaaatataagaccttaaactataaaaattctggaaggaagcctagggaaaacttgtggacatcagcttaggcaaagaatttatgactaaaatctcaaaagcaaatgcagcaaaaacaaaaatgacaaatgaaacttattaaaattaaagagcttctgcacaggaaaagaaacagtcaacagagtaaacagacaacctagggcaatagtgaaactggaaaagttcccttgttcccttcgcagggcatgcaatgggagtgtggcttgctgcttcttcagtgccctgctgctcaagctcctagcgggagcatgcagatgggcaggttgtggggctctgaccccacagcagtgtctaggggtggaacgtttacagctgaagtcccagtggccgtgtgttacaatatgctgtttcattttagccttctgtaggcagcttgtgctaggcagctcagttaggctccctgccttatcgcaaggacagagggctttctgtatcccggagtttcttgccttggtgcaccagaagaatcagatcacacgtgggctttgagaatgagtgcaaggtttttctgagtggaagtagctctcagcaaatggggagaccagaagggagatggagtaggagggtggttttcccctgcagcagggttgctcagcagccctgactcccctcctacccaaactcccgcgtcgttccgctggtggatggcctgctggcctgccacgtctatacctgtgctcttacactggtgcatgccccttgacacccagccgcttgggtctcttcccactggtgtgttcctctcgatgaccagctccttgtgtcttcctctgctggtctaacttctgccatcttctttgacgtccagctgcttgtgtctcttctcattagtgtctgggggttttataggcacaggatgcagggagtggtgggccagggtggtcttgggaaatgcaacatttgggcaggaaaacagaaatgcctgttctcacataggttcatgggcacaggtgcaggggtgaagccctagccagagacctcgccctttccttccctgcacttcctgtcaccctcttgtataaatagaactctttctttctttctttctttctctttctttctttctttctttctttctttctttctttctttctttctttctttctttcttttctttctttcttttcttttctctttctttcttccttttttttttttgacagagttttgctcttgtcgcccaggctggagtgcagtggcacgatcttggctcactgcaacctctgcctcccgagctcaagtgattcttctgcctcagcctcttgaatagctgggattacaggcgcgtgccaccacgcaggctaatttttttgtatttttagtagagatgggatttttccatgttgagcaggctggtctcgaactcctgacctcaggtgatctgcccacttcggcctcccaaagtgctgggatgacaggcatgagccaccaggcctgggcaggagaatatttttctattaaaatgtgactccgatgagacttagaagacttcataaaatagaaaattcctaacagaataggataaaatatgtgcaaactatccacgcaacaaaggactaatatccaatatataaaacttaaacaaatcaataacacaaaaacgaataaccccattaaaaagtaggcaaaggacataaagaaatacttctcaaaagaagacatacaaatgaccaacaaacatgaaaaaaaatgctcatcatcactaatcatcagagaaatgcaaattaaaagcaccatgagacaccatctcacaccagtcaaaatggctattaaaaagtcaagaaataacagatgttggagaggttgcatagaaaagcgaatgcttatacactgtttgtaggagtgtaaattagttcagcacctgtggaaaacagtttgaagattcctcaaataacttaaaatagaactattatttgacccaggaatcccattacaggatatctacctgaaggaaaagaaatcattctagcaaaaagacacctgcactttcatatttaacacagcagtattcacacttaggaataaacctaagtgtctatcagtggctgattggataaaatgtggtacatatataccatggaatactatgcagccaaaaaaagtaatgaaataatggcctgtgcagcaacatggatgcagatggaggccattatcctaagtgcattaacacagaaagagaaaatcaaataccacatgttctcagttataagtgagagccgaaaaaaaatggataggcatggacacaaaaatgtaaacaatagaaactggggtctcccaaagagcagttgggaggatgagagtgtgtaaggattgaacaattacctattgagtactatgtgcagtatttgggtgatgggttcaaaagaagcctaaactccaggattacacaatatacccatgtaacaaacccacatgtgtaccccctgaaactaaaataaaaagaaatactaattgcaacacatgacttttgataaatgataaattaaaaccaaagaaatgaaggcattattcagataatttagaaaatataatatgaactaaatacttgatgaaattcctaattaatgaaaatatctcaaggtgaaaatagtacatgaaaatcttatcatcattctgtaattcatgaattagttagtgatgttgtgttatgaagacagcaacttacatacaggtggttcaaaaaaaataaagaaattgaaacttctaagaaaacagattagatgcagttttacctgctcctttcatgaagctgaactgaaaactctgaacatgattcttcactactgccttacaagtcccttagactctgtttacttacttatttttagtcttgtgtgtgtgtgtgtgttttatgtagttatttatcactacattgtcaagtacaggaaattcttccaagtctcattaaccattaataacaaagaaatacatgtttctgtagagtgtaaaataatatatgcaactaagcatcagaggggtcctgcatgtgaagttttagtagatattgacaacttctccgaagtgaatataccactgagacaggctacagagcactcatgatgaataccttttatacaactctttattctcacatttgtcaaattttggtttagcttttaattttaatcattctgctggacatgtggtattatgtcagaatgattttatttgcactgtcctagtgattaaaatgtttgagcaactctttgtgtgcttattggtattttgtatatactcttttgtaaaatagctattcaaatcttttgcccatttttgaggcaattggcctgtttttttctttttgattattttctgtgtatcatggatatgtgtcttttaaaagttttgtgactattttctcacatggagctgtttgctgttgctgccttattttgagctcttttgataaaacctattcatgtaaattaattaactacatttaaaacatttcatttttatttttatttttatttttttgagacggagtctcgctctgtcgcccaggctcgagtgcagtggcgggatctcggctcactgcaagctccgcctcccgggttcacgccattctcctgcctcagcctcccgtgtagctgggactacaggcgcccgccactacgcccggctaattttttgtatttttagtagagacggggtttcaccgttttagccgggatggtctcgatctcctgacctcgtgatccgcccgcctcggcctcccaaagtgctgggattacaggcgtgagccaccgcgttcatttttatttaaaaatagcatattttataatagaagtcatctttcattcattattgcctcaaattttaatcatgcttttgaattctcacagaaccctcaaattgaaaccactatccttgtatctaatatcataaacttattttgtctgaagaagtgaaatcaatataatattcacacatttgtgctaggcttcttttttattcatgactttacaagtgttttagtattctttcatcaatttatggaattccattgtgtagatatatcaaaattaatttggcttggtaatatttagtattctttcatcaatgtacagaattctattgtgtggatatatcaaaattaatttgacattataacataaaacatttattatttttggatttatattattataaatgttcttgctgtatctgatgtcttttggtaatgatagttccaattctgttttatatatataaagtagcaatagaattgctgtgacataagatatatgtcgttcattatttgcaaacagagacaatttttcaaagtaatttaacaatttaaaatttaagtctcccaaagcaatataagagggatctagttgttcaaagtcttaccaactcatgaatttcattctattttagcccttcccatatatatatgtataatggtaatttatggtggccttaatttgcataaacactgatgtatattgtaaacagatttcaatgttttataggctacttattatacactttttaaagtaactgttaaaagagtttgcaattttaccgttgaactttctttttctaatttatattttatttcttgtgtatatacacttgtgtgaacaaacacacatataattttaatacaagtcctttgtcttatatgacttgtggatatttgcctgacattttggatttttattttatcttatttttgacatttttgacaataattttagtatttaatgttcagattaagatctgtaattcaccacaaattgacatttttgtatggtgtacagtagggttctgattaatttttccatgtatatatctaattgacccagtactatttgttgaaaagaattatatatacatatatatatatatatttttttttttttgagacagagtctcactctgtcacccagcctggagtgcagtggtgtgatctcagcccactgcaagctccacttcagggttcacgccattctcctgcctcagcctcctgagtagctgggactacaggcgtccaccaccatgcccggctaattttttgtgtttttagtagagatggggtttcactgtgtcagccaggatggtctccatctcctcacctcatgatttgcccgccttggcctcccaaagtgctgggataccttgaagtatcacttttatcataaactgtgtggtcatatatttatgggtttgtgtttggacctatatttaacccttgaatgaattattttctgtttgcctatctttgttagatagtgtattagtgttaagacactgttaatatgataacattataattattctagaaaatagcatactctttagtactctgtattctccagttttattttccaccttaggtaagcttccctttctattatagaacctttgcactgctatgaaaagattataatgtctttgttgaattttatactcagaacttactgagatgttgaatgacactactgaatatagaaaaactgggtaggagacatagtttttacagtattggctcaatcaatccaggaacaaggtatatttaatatttgcaaagatttatttaattattctcagtaatgtatttaatttaatgcataaagttctaatttatcttttcttaatattttccctttttgtgttagtatttgataatgtaaaggctgatgttaatccaagtcatattattttggaaataacatttctcatattttattgttaatatatggaaaaatattatgtttaaattgattttataaccaattacctttctagatttatttattaattataatagtgcaactatagtctgattttcctacatacacaattatgtcatttggtaataatgatagtttatttcttcttttctaatctttgcaatttttttctcccctttattttcaaaggggattaaaactcccaacttgtatgtagactgagatatagacatgtagaaatagttacaaaagtcaaaaagtatgcagacaataatatgaatacaggtaatcatgtaaacatgtcaaaaagttgtctgagtggcagagaattaaatcagaactatattattaagttagcaaattctcagaaatctgaaattttgtatgtagttttcaaaaataatttcacattatttttctttgagtgtcttttagtaggtataataccacaacttgtgggcttattatggtcacgctgttgaattagagagtaaataatttgtattcagtaaaagagatctatatagagaggatgggtaatgtgagaatgacatataaagattgtttgaggtacaactatagaaatatacaagtagaccaatacaacaaaatagtaagtctagaaataaacccatatatgtgtagtcacctgatttatgacaaagatggccagctttttttttttttttcccaaatgtgatagtcttccaatagatggtgcttggttaattgaatttggacaaaaatgattcttactcatagcatcacactataaataaaaatcaattaagaacctttagtagttttaaatgtaaactgtaaaaaaataaagcttttataagaaaacatagaatactgttatgtcttagtaaaggctacaataaaaagataccatggatcgagtggttcaaataacaagcatatatttctcatagttctgggaagatcataatcaaggtaccagcatataccatttctagtgagggcccttttcttgacttgcagaagcctgtcttctcttgatatgttcacattgcagagagagacagagtagtaaagagagagaatgttctagtctctttctcttctaggatactaatcccattagggcctcaaccttcatgacctcatgtaagcctagttacatctcaaagttcctgcagcctaaaaccatctcattaaggggtaagttttcaacaaataaaggtgaagggagacaaaagcatgcagtccataacaatttatgacattacagaagatgaaggtttcttatttagcatggaaaaagagtttactatcaaagaaaaaaactaaagattgctttaaaatcgttaagtgaaagttaagattaaaattaagaaattcttttcctaaagacaccattaagaaagtaacaagataagagagtgaaagaatacatttgtgaatatgcatctgacaaaagatgtgtatataatatatgtaaaggaatactacttaaagacatatgacctaatttcaaaaaaataggaaaaatatttaaatgggtactttacaaaaatggatatctaacagaccaataagcacatttgaaaagttgctcaactttgttaacccctagaaatgcaatgtcaccaagtacttatcagaaaatttaaaatcaaaaagactgatgatactaagtattagctaaattacagagcaactgggattcacgtccattgttgatgtaagtattaattgctactaccactttgaaaaactgttcggtggtatccacttaaatcaatactaacattactaacgacccagtaatttcacttctaggtatatttgcaacataaatggttataaatatcaaccaagacaaatgttccacatgtctgaagcagcattattcgtaagtgtatgaacaaaaatatagataggtattcttttcatccttcaacaactgaaagaggaaacaaacacatatttttatatcatgaaatgctgaatagcaatgacaatcaatgacatatatctgtatgcaataacatgcatgaaccataaaaaattattattgaatgaaagtagttgcaaaagaatacatacacatacactacttacataaatttcaaaagcaagcaggaataacctgtttgtagaaatcaaattatgattatgtgctagtgactggaatgagacaggattagtgcttctgaggttttggaaatattaatgttgtgtattttcgtgtgagtgttcatcaaattgtgtgttgcctttgtggtaatatatccagctatacaaattattatatgtacaattttcatcatatacattttacttcagtgttaatattactttaaattaatataaatgattttaaaacaaaaacctattatgatgttttaatgatatcttagtcataaaataattttatataaaatgaacattttataatatctattctggattaattctctattgtgttctttatttatctaactgattgctgttctatatttctttgagtatcccttgtcatgataaaatttttaaaaaatcaatttgtggctaatacattttcagcttcattttgcagtagaaaagttgaagacatagaatccaatatatttcatcacaagtcacagtggatcagataaagtctgtaaaaatcagcttccaaatggacaaaaatttgccttcacaattaggattcataattttcaaagtactaagaaaaacataatttaaaatcctagaatgaaactcaaatacatttctgtgcagttatcaggtgtgggggtgggacggatgagcattgccggtaattaacactccagggatagcattaagctgaaaatgcattgaagttgctgaaaaactacctctgcttcctggaatctggagtgggacagatctatgctgtctcccagaggtcccagtggaaaaaaaaggttcagttaaccatagcaataaactggtcattaccgtcttctttattggatttcttccttcctctgtctcactttcccattccctgttgttgctccctgaatccacctcctaattaagctttatacatgacagctcttgtatcaaatactgtttctgaagccaacccaatgcaatgctaaagctggagaagaaataaaacccataacaaaactcaccagcttatttaacagatgactgagatgcttggaagaatcctagggagttttctgagaaatgttctggccctacccacagttagtgttttggcctgtctccttgcaaatatgcacggtcataaattagggcaaaaaaaaaaaaaagttaagctctgcaattttatgttttccaaaataaaaccattgttttgattaagctatacaaaaagcatgtgttttattttaattataatgcaaaataattatttttcttacacatttgtcttttttatgatacaaaattttctgccatttttttccctttctctttcattatttttgtataactgtgataaaatttgtggttttataaaactgtgctgtttgttttaaaacaccacaaataaagtgggacataagtgaacagattataacactggaaatagaaatatagaaaatcattccatgattttgctaggatccagaatggagtctaatctttaactctgtcagtttatgatttgcagtggcttttcctcaaccactttctccaaacaatatttatgcttcttttggaggaaaaatgtgtaggaatttgtcatcaccaactcaaaagcatgtaggaaataaccagaacagacatgtaagcaacaactcaaatatgtttgcaacacctttgcagcaaaaatgactttttttttacaccagtaacttctgttattcaacataagttatgttatgttgaataacataactacttagaagtagttatgtaggttatgttgaataacttagaagtagtttacttcagtgcttgctcattcaactatattgtccatgaaagccataacacctaatcataagcaataaaaagcaaaacgacacataaagatccatatagtttagtatcagggcaaaaaacaaattagaagcactactaattcctctgtgtttccttccaatccactctcactctctaccaacttctacatttatgaaatgagcctaaacaaggaacattcatgactattgcctcagaagtctcaacatattttttggtttatttatttctgtgtgctacttggagatgttataattggaatatatcattactatagacggaactactgtgtacagtttagaaagttgcatttctatattagttatgggggcattttcaaaaacattaatttgataaaaagatttgaaacaacatcagaaatagtggacaaaaatggctaacgtagaatttctttcttttgctacgattccggaatgatccacttctagctagtgccagcacatcactcaaaaccatctgtaattgatgatattttttcttttatttctagtaaaaacaaaaaaacttagaatgaaataattttagctgggagtaaactagcagtgacatagaagactaaacaatagccttgcgagtgacatgttcatagaactgtagtttatgttcaacatttgttgcctctaaactatacccaacttatcagagaatgctgaagaggaagccctattttgtgactaggaggattatatggtatcagcctcctcatgcacattctaaattgcagtcatctgaagtctggtagcaagatgttccatctcaactgaggccctacagcattaaaaataacgttttcacaaatgtctaatgattacctgagacaatgttggctttgtcccaaaagtctcccattagaatttgcttagcctctatatagtatgtagatacgccacaggctctgcactttctctactgagtcagaggggcaaaatggctgagagggatacacagaaggaaagctctctccactctgcctgactgaaaagtcactttcaaatgaactgcttcatggtaacccacaatttcctattctccacatcatttcagcataccgtaaatgtaattgaaataattttctttgttatattcagaaggttgacatccttttggcatggatctagagagctgtcacatgcctgtggcaggttttttgtattttgtttttgtccctgtcatgtgaacgcaaactattctttgtttattcgcataagggaaaagagacattcaagattaattgctggttatctgattccagtgactgaattgctttgatctaggtataaaaagatatctgtaaaaacaactataattgggtgctggaaacatcatcatctatgcatctttctaatatttaataatggctctgataccaccaatacacacatagacaaacacacacacagacctgatgttgtttgtaatttattctttaggcaagcaggagaaattccagtgatttttaccgaactctatctatcaaaatagttaagtcctacttcatggttcacggtctggaagaataaacgcggggactagtatagtccttttagtgaaaaatgggtttatcaccagacacgtacatctctgcgcgttagccctggttagcatcttgggtccctgaaattggcattattatttggtatatttttaaagattcaccaataataatgattttttacagcataattatacaggtaaatactcaaaggtcagaggtgggaagaaatggaggagtgatcagactatatacatagagtgatacagcacagatagtctacaatgttgcaatgtgaagggacactgaagattagaactgactcattttggaaaattcgcaggtggctgttatactgtaaatccaacagtgacaaatgttaacctatggaccaaatctagttctatgcctgttttaaaaataaagttttattggagcacattcagtcatttacaaatgatctaaagttgtttttatactacaatagcagaattgagtaattttgatatatatcacatggcccccacagagcccaaaatgtccaccatctagcctgtacaaaaaagttgtggtgagcttgagactgaatagttagctgaaattatacttcccttaccagctatagattctctttatataaactgaattgtattttactggctctatcagtttaatatctatatacctacttattatacatagcaagggatctctatgaaatataccaatatttttctaattcacctcatcctaagaaactgctgggaaaacatatatttctaagttcaccatggaatatcctgatgtagcatttctgctaaattctatgaatattttcacaagagccacaagtaatgattatgagaactatgggaaggcaatagaagaccatttgcaggtaactgcttattaagtttgccttgccgttatgtatgttgaccataattatgccaattcaggttttggtggctaaatgttctcaattaggatctaccatcttatgatgctcctaatcccactgaattcagtaggtttatttcacttatgttctccagaagaaaatctctgagattatcatttcaccaaaatctgacagacatacttgtcaggaaaatatataactcctccacacgtgctgtagcaggtgtgtgtgtgtgtgtgtgtgtgtgtgtgtgtgtttaaatgtgcaaaggttgccaaagatattcctgttgccaaaattattcctgtttctaaatccactgaactttcctgtccattaccaacttgaattctcaacagtactgaatacatttatagggataaaataataccatacaacttctcattattttagtccataaaatttaaacccaagtcctattggttacatctccgtatgtctattaaacctggttattctatcaaatcaatttaccgtcactctaatctaagtcattatcatccctttcttccaaattaatacagttgtttcactcttgtttacctgtgagatgctcaggtgtagccaaaatcttcctttctaaataaatactgattaattttatatatttgtgtataatttcctaatggacttccattgtacctgggataacatccaaactccttagtatgacttgaaagttctttcaagatttagctcctatttttcagtctcattgtctatcactctccctcttgttcaatcatcatatatacaatactgtctctcagacaaaaactaaagacataatgttccatctgcctagaatactcttctcatgttttccttccactacattcatttgacttacttgttgcttgagacatgctaaaataggtgtgtaaataagagaactctgcttgacacagtggggatctgtgtccccacccaaatctcatgtcgaattgtaatccccaatgttggaggtggggcctggtgggaggtgattggatcacggaagtggtttctcatggtttaataccatccctcttgctgctgttgtggcgatagtgagttctcatgagatctgcttgtttaaaagtgtgtagtacctcctccctctcttttcttccccctgctcctcctaggtaagacgacttactctctctttgccttccgccatgattaaaagctccctgaggcctctccagaagcagaagtcgccatgcttcctgtatagcctgtggaaccatgagcgaattaaatctcttttctttataaattacccagtttcaggtatctctttatagcagtgcaagaatagatgaatacactgctgtaatgtcaattatattggaaatgacttattcagtaccacaaactctatgagacatgagaacttacttgctcacatgaatctggataattaccagaacaaagcaggtaataatgtatgtgtgttaataggatatcttttccctctaacatcttactttttaccaacttattaaagccttgaagttaaacttattaaaatataacctacgaagattcaagtattccccattgaccaacttgtttaagaattttagaaactgaactctgatctatttaaaatgagttaattagattttaaaattttcttactatttaactactataatgtttaaaaaatattggtgttcccaatattttaataacttatttgatataaaataattctttaaactagagatataatcacaagttcagacaatttgtagctacttggatcgacaaatttcatagttacaactgggagctgataaagttttgtaataaatattataaaaacacacgtatgaatccaaataagagacagcacaaaaataatgctaataccataagcctagtaagtctcatttctttttctgcatccaaggcctgaaattatgaggttcacatgcaagacacactctcatgtcaaagagattacggcagaaaaatcactatagaattttatattgcaaccaactatttactatatttttaagtcattctgtatagctgtaacattcaaactctagatgttagttgacaccaaattcccagttaaagccatttcctctccaacttaataaaaggtaatagaaagcaattaagaataacattatttgaaaaaattatatatatgttctttttcatgaataagttttgtataaattgcatcactctgcttatcattacaaataaattacttgctataatcttacaaatgatggtgacaacgaaatgtaccaggaaacctacaggttaatctacaatttaaaaggtatattttgcttatgcatttcttttcctgacaactttccaactagattgttttcagagaaaattcttgtgtgagaatatgtagtcaaagataacaatccctatgtgctatgaactgggtgttttacatccctcaaatgtatatgttgaagccctaacccttaatgggaaggtatttggaagtggggcctttggaaagtaattaggcctagatgataccatgagggtgggatcccatgctgtaactggtgtgcttataagaaaaggaacagacatcagagctctctttctttctgccatgatgtcaggacacaaagagaatgtagccatttgcaagccagaaaaaaagtcttcatcagaaaccaaatgatccagcaccatgatggtggactttgccttctccaaatttatgagaaataaatgcctgtaagtcacccaggctgtggtattttgttacaacaaccacagcagactaagactcttataatgatatgtaatgtttaaagaaaaatggggtgggcaattgttcagaagatagaagaagagaaatgaaggacagtatagtatattccagctgggcatggtggtttatgcctgcaatcccagcactttgggaggctgaggcaggaggattagttgagctcaggagttagagaccggcctgggcaaaatggtggaaccccatctctacaaaaatacgaaaattagccagtgtcgtggggcatgcctgtagtcccagctactcaggaggctgaggtggaaggatcttgggcctgggaggtggaggctgcaatgagccataatcacaccactgcactcaagcctgggcaacagaacaagaccctgtctcaaaagggaaaaaaagagagagagagagagaaggaaggaaagaaggaaggaagggagggagggagggcagagagaaagaaggaagggaggaaggaaggaaggaagatatttttcagaagcatcgatatgttaactgatttgtcttgatgattacaattttgttcataaggaaggatctcagttcctcccaaattctctcctacttatcttctgaactcaaaccacagtggtttctgaggcagaacccaataacactttcagttcatcccagtcacctattgctacctcatttgtagcctttcggatcaattatgaaaatattaatacttagggaggcgaggcacagttgctaacacctgtaatcccagcactttgggaagctaaggcgggagaatcagttgagcccagaagtttgagaccagcctgggcagcatagtgagactctgtccctacaaaaaaataaacaaaattaggcgagtgtggtggcacacctatagtcctaactattctgcaggctgaggtgggaggattgctcacgccacggaggtcaaggctgcggtgagccatgattgcaccactgcactccagcctgagtgacagagtgagacactgttccaaaaacgaaataaataaaatgtttttaaaaatgaaaatacagagagcacagcaaacaacaattctcatcagatgacatgcaaacttaatggcatttttatttcacttctagtatctctttcttcctttaaagctgtcttcacagattgtttttttcacacaaaaattttctgattgaccctactacctagtttgcaagctgagaattcaaaatttgtgggaaaatgatatggattcaagctgaagagtttctttgcagatacttttcccattaaattaaaaaaatggtaaaatatgtgaagtttcttttaggctttctgatttaggctctaggttcctttgattctaggaaggagaatataaaaattttcatagctgcttcgaatttttactctcctttctaaaataaaataatataaagaaatcttatgaaaaatgaatgaattaaaataggctgcctttttatcatgaatatttctatttaaagttgcatagaaagtcattgaagtttattacgctcgttatgagaagagggttaatgtcagaaattgagaactatgcaacagttttttaaataagtatttttaaggcatttaacctatatgctaagattaagtttccttgttatgatttcacatttactaacttgtttatatagataacttttttcttctgtgagccaacatattttaattatttcattcatattataaaatatcatttgcctaatgatacaacaaatacaattattacagatgtcaatgagttaagattttcaaaatttatgtcttatttttactgtggcacttaacccttcatttaaatatcatttcatttttttcttaaaataccatgtttcttcaatgatttcagcatatcatatgcaaaaacttttgtttagagaaactcagatgaataattatgttctcattaaaatgcaacatctgcagacatgctcctaattatcctcctatcgattttctagttgtttcagagagtgcaatgcctttcatcattctagaattaaagagtaatactattttcaatttctgtaaaatatacgacactataagatagctcgcattccatgccaccgcatggtcacaaaaataattgcctggcagtttcctctcaaactcttctatataaaaatgtacagaagtatggttattcaatcaaaagaacacaagtataaaagtttttggctgactcccttctgaacagcctcagattcatatctgtaaatggtaaaatctactttaaaagatcattaatttgtcttcgcttgagaagtagtgagtaccagtaagcctaagtcatttcactgagtccttgatctagcctagaatctctactaagagtatttcctgagatgtattttgacatttaatgatatcagttcacttgaatatgttcacaacataagtaagacacttcagttgaaacaaacttctaaggagtccgtctcatgcctttagagacgcatctaggaatagcagttagaactctgtagcacactgcaacagtcacagtctaacatttctgacataacttaactcctcgaatcctggtcctttatagcattctggaaagttggagagttttataaatttttctcctttgttttttctttgtattgtcatcaaagacaattgagtttgaagatggggcacttcagtcagattcaaccctttacttctggaatgctgcaaacaacacaaacttctgggaacaaaatccctttcagtttcatcagtgaatcacataattggttcttgaggttcagaatatatttattatataaagacattatttaaagacaacatgattgccatgcgttactcattcatagattccctctccaggactttttttttgtcgaacaacaaaaggtcttttgtgacagacaacaaatcacaaaactgaacaacatgattaccgtgaaatcacaaggcacaagattagtacacagtgttacagagcaaaattatggagaaagtttttcttgatatagtatgttgttttatctataacacaagttatttacttcaatttatttttgttttgttctattataaactttaatgtaaacgtttgttcaacttttaccacaatgatttaatccatgagattctttcacggtatctattttaattcaattgtgcatgagaacttatatacattcactgatgctatgtgattatgattttctagactacgaccaaattattattgaatatttacaaaactgtaatattcggaaaagaagaaatgcatgtgtgccttaaaaagacacataaatcacatattaatgaaaaacatacaactaattttagtaaacaagacagaattaactttgaacttaattttgtaaactacggtgaaaatactccctttagtatcttatgtgtaaaaatgctatttttgtccaagcacaacaatatgtacagtatgacaacatatgtttctttatcatcactggagctgacttgttaagctgccaatgatttcaatggtaatgagcaggcaatttcagatccagtgcaaaaattcacaaaacattttatacctttccttctcagaatgttaagctagacaatatgatggagttactgaatgtgtcatatatgaggctgatttctccaatgacataactatataacttgagaataattagaagggagattaatcactttgctattacttcaaagtcacttgtatgcaataacgtattggaagcaatacattaaaaaccaagacactttatgatatgaaaaatatccaaccttaatttcattttttcaaattatagcaatgaaaacacaaacttacataactaaatattgtatgactgtactaaaaggaaacatatctataaacccaataaagcatatatttccttctttgctaccattcaccatgaggtacggtcatatcttctttgttcctcaagacagcagcgaaatacagtactcgttaactgaggcaaccaaaacatctaattttttttcagatgtttattaaacagagttgaagtggtttcactacataatttactgtactaattatcataacttagaaatttgccagttgtcttttatgtatatgtttgaccttcccctgtgaaatatattcatggaatatttgtttttctcgtaggctctgcattcttaaaatttatttatttatttagttagttagttaatttttcagatggagtctcactctgtcgcccaggctggagtgcagtggcgcgatcttggctcactgcaagttgcacttcccggttttaagcaattatctgcttcagcccccagagtagctgggattactagcgcctggctaatttttgtacttttagtagagaagggggttttagcatcttggccaggcaggtcttgtgagctcttgacctcgtgatccacccgccttggcctcccaaggtgctgagattacaggtgtgagccactgagcccagccaaacttatttcttaaattagctgtctaaatatctatgagaaaataaaactcaatttaaaaaataataattgagccttacaattatacagcaaactgtctttgttggtggtggtgattataaaatatatcattaattatcttttaaagcacacaggccatggaaaataaaaccggaacaaatgtagcataaaaattattttttagtttttttttttatcacagtccatatgcaagaaaaagagaaatgaaaaaaaacaaaagaaaaacaaaagaaaaccttaccaaacaccacttatatctgagactgttataattcatttagaaaactgtattcatgtacttggggaaagaaaaccattgtattcagcaacataaacatatacccccagaatacgtttatttaatgcatttttatccccatttaatttgttaatatttgagagtttacatttagatttccaatctggagcatctttataatctatgaatgggttaaaacaatttagtttctttttccggattagtaattgctcctagactatgaacttcataatggctgtggctttctttttatattctgtttgctaacaaaatcccaggaactgaaacattcccagatacgtagtaagtgctcaataaatatttgttaagagtactgtattctttttacaatgtccaacatgtacgattccatctcttacaataaaactgaatgaaaggttattgcaacacaagctatggaacttttccacctcttgtttataacatgcccattatttaaaactacatgattttccagaatatttttgtgcattttctcctatatcttatgcccttataaaaaagaaagaatactgtttataaaaaactaatatttcaaactaatatttcacatatggcgtgcagattatactgtttctttcaatgaaaacatttaggctgggcgcggtggctcatgcctgttatcccaggactttgggaggccgaggcgggtggatcgcgaggtcaggagatcaagaccatcctggctaacacggtgaaaccccatctctactaaaaacacaaaaaattagccgggcgcggtggcgggcgcctttagtcccagctactcgggaggctgaggcaggagaacggcgtgaacccgggaggcggagcttgcagtgagccgagatagcgccactgcactccagcctgggcgacacagcgagactccgtctcaaacaaacaaacaaacaaataaaaccaaaaacatttaaacattcattttgatcaaatgaaaactctctaaattaataagtcaatcagtagttaagaaacaaaaatcaataatgcttttgttagggtagtaataaatataaaatgcaacagagggaattgcactcactgtaaaaactaaaaaatactaggaaatgatgaaaactacatcgttagtatggtaaggaagctaaaacatttattaaaagaaaaatataattgtaacatgttttgaaaacagaagtatgtaatgctatcatggtattcatggaaacatgacttgctggaagttctacttagatgggtgaggcttggacccatccaggagcacatcacgatgagcacaggatctttggatggatcatcttgaagtatttagcatgctattcatcttttttttctttccttatttttcacccaaaagataaataatcaaggacatcaacaaaatgttcacaatagatgaaatgctcatgacggaaggtaaaatgtttaaaacttatcatttatgtgtctcacattagcaaaaagaaatgttaaaatgaaatcctcggtgctgataaggatgtgttgaacagacaatttaaaataacagataacactgcctatatcatgtatattaataaagattttgaaggaacgtgtcactgagactatgcaattctatcatactctttaacatagcaacattgaagatgggactctgtcactgcggcaatttggatataaataaagtttatcacagcgtatttgataatagagggaaaaactgggggaaaaaacattagccaagaatggtgtgttacattaaaaaaatgaagatcacagagataacttaaaaagaatggaaaattgctaatacatactattattatgctgttcactaacaaaactctagaaactggaacattcccagatatgcagtaaatgctttataaacatgataaatgtgataaaagagtggaagcaccttttacctgtggtttctttataattatgttttggagttacagttgctattcccaccatcactggacattttacttgagaatttcacaaggactgcccgtcaatatataaaagtactaggtttccttaacatgagagggcaattgtccatgaatatctaatacatgcaggtctctttgttatttactttagttgcaaaacctagccatttggatggccaagtaaccaacggtcatcgagtcctaaccaaatagaatagaaaataatgggaatcggtaagcaagttccacttatttgctttctccatggaaaataaatgtaacagtatctattgtgtctgaatatacaacgtagtcaatgaaaggtcttcattggggttgataattgttgctttcaacttgctcaatagggaaatgtggctggtgaacaccatgctctcaccatcctacacaaagtgttaaattctccactttccttagggtaacagaagaaacatgtaaaaaaaaaataactgtctgtgttaggccattcttgcattactaaagagttcccaaaactgggtaatttataaagaaagtaaacttaattggctcatgcttctgcaggctttacagaaaacatggttctggtatctgctcagcttctgagaaggcttcaggaagcttacaattgtggcagaaggcaaagagggagcaggcataacagaagcaacagagagagagagaaaaaaaaaagaaagggagggagagggggaacagggtgaggaaggtaccacaccaaaatcagatcttatgagaactcactcgctattgcaaagacagcaccaagccatgcaggctgtgcctccatgatccaaacacctcccacctagccccacctccattactggggatcacattgtgtccggaattggtgggttcttggtctcactgacttcaagaatgaagccgcggacccttgcggtgagtgttaacagctcttaagttggtgcgtctggagtttgttccttctgatgttcggatgtgttcggagtttcttccttctggtgggttcatggtctcgatggctcaggagtgcagctgcagaccttcccggtgagtgttacagctcataaaagcagtgtggacccaaagagtgagcagtagcaagatttattgcaaagagcgaaagaacaaagcttccacagtgtggaaggggacccgagcaggttgccactgctggctcgggcagcctgcttttattctcttatctggccccacccacaacctgctgattgatagagctgagtggtctgttttgacagggcgctgattggtgcgtttacaatccctgagctagacacaaaggttctccaagtccccaccagagtagctagatacagagtgtggattggtgcattcacaaaccctgagctagacacagggtgctgactggtgtgtttacaaaccttgagctagatacagagtgccgactggtgtatttacaatccctgagctagacataaaggttctccacgtccccaccagacccaggagcccagctggcttcacccagtggatcccacaccggggctgcaggtggagctgcctgccagtcccccgcagtgcacccgcactcctcagcccttggatggtcgataggactgggcgccatgaagcagggggcggcgctcatcagggaggctcgggccgcacaggagcccacggagagggtgggaggctcaggcatggcgggctgcaggtcccgagccctgccccgcgggaaggcagctaaggcccggtgagaaatcgagcgcagcgccgggacccagtacaccctccgcagccgctggccagggtgctaagcccctcattgcccggggccagcagggccggccggctgctccgagtgtggggcccgccaagcccacgcccacccggaactccagctggcccgcaagcgccatgcacagccctggttcccactcacgcctctccttccacacctccctgcaagctgaaggagccggctccggccttggccagcccagaaagggcctcccacagtgcagcggtgggctgaagggctcctcaagtgccgccaaagggagagcccaggcagaggaggcgccaagagcaagcgagggctgtgaggactgccagcacgctgtcacctctgaacatttgaacatgagatttgggcagagacaaatgtccaaacaatactactatcttctagtatgtatttcctccaatgggtgaacattttggtggagtagttcactatgttattttatgcaggaatgtgggggaattatcacagttatttttctgaaacatatattttacttaaaatattttaaaaaagagaattgcaaatcaaattcaacaggagttttctctctttgagaaggcattgaaatcataagtagctatgagcggtttctttatgctttactgtacttttcaaattttatatgctgaacacatattgttgtgaaattcaggaaaaaaggagagtttatagaaaataaatagattcatacattcataggacaaaaattggttcttagccaataaatatattaatatcttaggcatagcttcttcatactgtttcataattgataactacctgaggtttccaaaaaatgacattcaaataacttttaaacataaagtttttgggaagtagagaatattattatttcatataaaaataaatgcctttaaaataaatatataactaataaaatcattttgcatttatgtctgtattatcaaaagtttggaatagaaatacatgtatggattttgaactcaaccctatttatatcttcttaaaaatatgttaaggaaaccaaggaaataagtagctgtttgttttcccaaaatccctttttaacaatgattggtgatcacaactttttctttttttattattatcattgttttatttgtgtgtatggttccatacgtgcacctgtgcacgcacatgcatgttttagtctgtatactattaaacattcaaatggattgaaaacatagctttgatttttttttatctcagttttggtaggaaaacaaactgaagtactaactggtaaaatgatttttaatggaacattttaaaatgatgtttggaaaataagtgagatttttacagtcaatgtaattcctggcatccagggaatatactgaatagggaagaatttcccagggtaaactttgtgacatgaagaaggacctcccttttggaatttaggaggaaaactgggctcaattaaattatgtatatgttatgcaaagaggataattatcttgctcatttccattactgcttggaattgtagcagtttctctttctaccacagttgaagatgaatgggaatgttgccttaatcattttcatatttgaagacccttcttttccttccatgctggcagctctgccttaggttggtaatgtctgtgcctgtccagatgcacaatatgatcaacagaggcaaacgcatttgtttgattaaacagaataaatgaggtgccaataatctttctagttttctggccctcagctgttatttataagcattctgcttgtgctgtcattattgcatgtcaatgccagaaaatgtttatttttaataaatagcataatggtatgtaaaagctcacagagaaaacaaatattgaaacaattctaatattcagataatacttactctgtcatatattgacagctgttagacttttgacaagattataaatccctgtcaaacttgtcaataagtattgaccaagttaactttgtcaagaatctccattagcaaatatgtcaggaaacttccacaaatatagtcattcaaagatgtattttatatcttcaaagcaagatgatgttacaaaggtaaatataggagttttcaagggacactttagcctttgaacttagaccttagtctttgagtgctaaagaattcttgccaattgcagaaatgttatttgttgtggaaagtaaaataactgaagggattttattaatggaacttaaaggtacagtcggttgatttgaaggaagtaaataagtgacatttcctatcacatgatgaatgtccaattaaacctcaaaagtatttaagacaaagggattaaaataactatagttacaataatttgataatggatgcatgatataaaaatgtaaattgagacatcaccaacataaaatgtgaggggaagggaagttaaaatgtagatgatttttgtacatagttgaagttgttctcagcataatatagaccatcacaattattaaatgttttacataagccacataatatccacaaaggaaataagaaaacctaagagtagagacatgaaaaataaagaaaagggaaatgaagcatataaccacaaatcacaatagactacagcaacagaggaagagtaaaacaaatggcttgtgaaatagaaaacaattaacaaactgacattggtaagcccttgcctgtttatcagtagttactttaaaataaatgaaacaaattttccaatcaaaagacataggttggctgaattgatttaaaaaacaaacaaaagtaagatcaaactctatgctgtctacaagggattcactttagttttaaggatacacataggctgaaagtgaagggactgaaaaagatactttgtgcaaacagtaaccaaaagagaagaggtaagattatacctctatcagacaaaacagactttaagttaaaaactgtccaaagtaacaaaaaggtcattatgtaaagataaaatggtcagtttcttaagaggatatcgtaatgttacgatgtatgtagcccacactggaactactaaatatataaagcaaatattaacagaaatgtaagcagaaaccagaagcaataaaataatagtggagaactttagcattcaacaatagataaatcatccagacagaaaatcaataaggaaacagtgaacaccaataactctgtagtccatataactctatagtccaaaagtatacaaaacattacatacgacagcagcagaatacccattattttcaggaacaactgaacattctgcaagatagaccaaatgttagtccaccaaacaagtcttaacaaattcaagaagattgaaattgtatcaagtttatattctgactacaatggtatgaatctagaaatcagcaacaggaagaaaattggaaaattcacaaatatgtgaaaattaaaacaatatgttcctgatcgaaccaatggatcaaaaatatcagaaggaaaatttttaaaattatattttgagataaatgaaaattgaaatacatatcaaatcttatggaatgcaacaaaagcagttttaagtgaaaagtttttaatgataaatgcctacaatcagaaagaaaaaatatctcaaataacctgaaattacagactaagccaagattcagaagaaagacaataataaagaccagagaaaaaaattaataaaattgacgctagaaaaactacaaaaatgtaaattgaagaaagagctaatttttcaaaaagataaacaaaattgacataactttagctaaagttaaaaaagaacaacagaagattacatcaaataaaattagaaatggaagaagagacagcacaatgataccacagcaacacaaaagatcataagagactgctatgaacaattacatgccaacaaattggatgacctagaagaaattgataaattcatataaacataaaacttagcaaaactgaatcataaagacttagaaaatctgaacagaacaatgatgagtaaagagatcaaatcagtaatcagaaaacttccaacaaagataagcccagagcctgatggcttcactggtaaattctgccaaacatataacaaaaattaatatcaatccttcttaaactcttccaaaaaagtaaagagaaaggaacacttttaaactcattttatgaggatggaattagtctaataccaaaccaagacaaggagatagcccagaaaagaaaatttataggcaatatccctgacaacaatgaatgcaaaaaatcctcaacaaaagttagcaaattaacttcaatatcacattgaaaggatcatacactgtgataaattaagatttatcttgggattcaaagatggtttcacatagacaaaagaataaatatgatacatcaattcaacagaatcaaggataaaaagcatgcaatcatcccaatagacacagaaaatagcatttgacaaaatttaacatcctctctctcacacacacaaaaaagcctcttctccaattaggtacagaagacgtttatctcaataaagaaagtactatatatgataagcccacagctaatactaataattaacagtgaaaagctaaaagctttttctataagattaggaacaagacaagaatgttcattcttaatcacttctattcaatatagaactgtaaggcatagtcagagcaattatgtaagagaaataaataaaaggcattcaaattagaaaggaagaagtaaaattacctatttgtagataacatgatcttatatatgcaaaaccctgtagattccaacaaaaaactgttaaaactaataaacaaattcaataaagttgcagaatacaaaatcaacatacaaaaataagtagcatttacatagcagtaacaacaagctattcagaaaagaaattaagaaaacaatcccacttacaaaagctgcaaagttaagatacataggaataaattttttgaaggagatgaaagatctttacactgaaaaccaaaaaacattgatgaaaaaaatcgaagaagacataaacaaatggaaaggtatcctcttttcatgaacttgaagactcattattgttaagagatccatacttcccaaagtgatctacagctttaaaagcaatccttaataaaattacaataaaatttttcagagaaatagaaaacactatcctaaattttatataacaccatgaaagaccatttcatggtcaaagtggaaaaaaatcctggcgacaggacagtatctgatgttaaaatatgctctaaaaccataataattaaactggcatgatactggcataaagataaacataggaccaacggaacagaatagaaagcccagaaataaatccatgcattcacagtcaactgatcttcaataaagatgtcaagaacacacaatgaagaaagaaatgtcttcaataaatagtattgggaaaatacactatccacatggacaggaatgaaatgaaattcttatctgacattatgaacaaaaatcaattcaaaatagattaatccttaaaagttttgaagttgtaaaactactagaagaaaacaggggaaatcttcttaacattgatctgggcaataatttttaaaacatggccccaaaagcacatgtgacaaatgtaaaaaatagagaaatgaaatcacacaaaattaaatagctctgtacagcaaaggaaacaataaacagaataaaaagacaacctacaaaatagaagaaaatatttggaaatcatacatctgataagtggttaatattcaaaatgtataacttcaatagcacattgaactcaattcagtaaggaaaccaataactggattttaaatgggcaaaggtcctgaacagacattgctcaaaagaagagatcatgatggccaacaggtatatgataaaatggtcaatattcttaatcatcagggaaatgaaaaataaaaccatgatgagatatcactgcaccctagtcagaatgactattagacaaaatattgagaatatagaggaaaattaatccctactcacagttgttgagaaggtaaagtagtatggccataatggaaaacagtatggagatttacagaaaggaaaagaaaagtagaactacaatatgatctagcatttccatttttgggtatatatatatatatatatatatatatatatgaaatgaaatcagtatgttgaatagatatctgcattcctgtcctctgtcctcctgtgttcattgcagcattatgcacaataaccaagatatgaaatccaactgtttatcaataaatgaaggaataaggaaaatgtagtgtacacacacacacacacacacacacacacacaactgattagtcctcagacttttaaaaggaggcaatcttctcatgtgtgataacatggatgaacctggaagacattatgctaagtaaagttaaccacgaacagaaaggtgaatattgtattatcttatttacatatggaatccaaaatagtagattcaatagcagcagagagtaaaatagtggtggccagaggctgagggcatcagtgggtgggggagtacatcagcagatgttggctaaagggtacaatgttttagttagcataaataagttttaaagatctattgtaaagcattgtgactatagttaataacgtaatatatacttcaaattgcatagggagtcgattttatgtgttctaactatacacacacacaagtatgtgagatgattatgctaatcagctttgtttaataatttcattatacatacatcaaacatcatatttaatatataataattaatttaaattataccttaataaatgtgggaattttttaaaaatgtgtctatttctgggttttctatactactacattgatccttgtttctactctgtcagtactactttgtcttattacaattatgtaataaggcttgacataaaatagaatgaccccttttactttattcttttgaagattgttttagcaatcctggggctcatacttttacaaataaatgatagatataatttgtgtcaacaaatgttcttgctggaattttgctaggaattacattaagtgtgaagatcaatttgagaagcactgatatcttttctttgctaagttcccgtccttttaattcccagtgaactcaaaaggtagatataatatacattaacacttttgaaaacataactttaaatctttcactttctgactatcacttccctttcatcaatcataattaatcctctcccctattctaaaataccttagatctccttgaaactaaccatctattgaactaattaattattaaatatgtatcacctcccagttataatgatttacctgtctctcaggtttattctatatatcatttaataggttacatcaaattaaatcagcttgtggtcttaaaaatccttatccaagaaagaatacttgaattttataatcaattatgttgctttcaactgaattctaattaattttggcatttacatgcttgtttattttgttgtagtttcaatgtgatagctattcccctcatttgatgcttcataaattttattttattttgtaagaaaaaaggtccaagagcatgcattttattattacatctttggctagattttatatactgtgttttttctattgctattcttaataaaatgtgtaacttttttcctgaactattctttgagtatataatttttagacatttaaaactcaattgtaaatatctatagctgttttgctttcactgttaggcttttttattttgtggagtttgtacaaaaactacaatttctactacatgggatatgttgaggtttgctttgtgacataatacacatttacttttgtaaatgcatctgttttggagatgattgcatagtctcttttttgttttaaaataatattaatatgcattgctatttgcacgtcaaaatgcagtgttcaacactgtttattatttaaatatcttctggatttaacatctactcttttacttgcactaatatccccccaaattataaacatattaatatttcacagagcaagcctaacagattttatttttatttatttacttatttattttgacagggagtctcactctgtcacccaggctggggtgcagtggcacaatctcagctcactgcaacctccgcctcccgggttcaagcaatctgcctcagcctctggagtagttgagagtacaggcgtgtgccaccacacctggccaacttttgtatttttagtagagaggtgatttcaccaggttggccagtctggtcttgaagtcctgacctcccaaagtgctgagattatagacgtgagccaccgtgccctgcctctaacaaattttaaagaaacattgattttatcagcttttagttgtagatgtgaatgtctttgacatattgtacatttaaaaaaaatcagaatgctaacttattttttatgtaatttaaatctattcagtactgcatttatttctgcatatcttttcttctgtataatttacatcagatatctaacatctttgtgtgcctgtgaagagtcagatagtaaatcatgtcaatatcatgagccataaggtttctttcaaatactgaattctgccatgttagcacaaaagcagccatagactatgtaaaaagaaatgggtataaccatttcctaataatactttatttacaaaagaggcagtgaggtaaatttgggggagtgactagagtttgcagatccttgatctacataattattctgcataatatagggggctgcatatgaatttatattcttcacttttttcttttattaagattattttaaaacgatgatatactctcatggagtgatattatctaaatatgtaagagaacatatttacatttagcaaagctatttactagaagaaattaaggcttacataggctaagatcacagagctgaggtcaagctcattctgcttggctctgtactgaactgccaaagtgtacaatcacttaatcattcatctgctaaacagacatttattttttatttgctattaaattaagtgccattttatgcatattatcagactcatggtcagagtctggttaatttacctttttctgacctccagaacaaacttgaaaagggctcaatggaaaccagtggcttattaaagtattaatgtaattagaagatctacaaaggagttttacagtgataagaactaatattaatagaaaaataagcgaattctgaagtttgtcttatttattaggtagcaatatgctaaacaccattatcactttatctcaattttcctgaaataaaggatttaaactggccaataagaaatcgtattgaaggctatctgaaaataaactataaattacctgtgagatatcacagagaatttggcatttttttatcttaatgaatcaacagaaggaaaatatgtagactcctgagaacacaagtagatggctttaaagaatctcttcccaggtttttgtcactttgtaatataaaataacaatgatataaacttagttgatgacaacaactgacataaaacatgtatatgatctttttgtttataggagtccttaaaatttatatgtgaaaatttggaaagtagtttaatgccacttaattattttaggtcctgagggtatcatttaaataactaatgcttcattgcactaaatggtccaaaagtgtcctcaaaattgtaaacttgttttcagaagtgcctaaagagtccctagggaatatcttaatcgtctagagtaccttgctcattagtatattgattcaaatatttctatgatactaggcatgcgagtctccacatgtaaatcatttataagacttttatttaaagatattttaaatctctttattatatctttattaaagaagccaaagggatatataaatctatctactaaagaaatggatgctaactgcatgtgggcagtggtgtataattcaagacagaaagcttaaatagcagtagtcattaaaaaaagcagttgagtttagatttaacaataataataacagctacttttgtgatcatcttattttctgcaaaatggaaaagaacactaataatgttattaaacatgtaaaatcagaatattttaataaaatattttattaatattaagaataaatattaagaatattttaacaaaatattcttaataatattgttgaataacaatattaatagaacataatcattcaacattaaattggaatttattaaatgcatgagttcatttatttgtaatttttaaataacttttacataatatgtaaaaatattttcctctgctatattatccccaaaaatgtctcatactatgttctcttctaactttaaaataacaccatgatttttaagtagtcctcactttatattacatatacatgtataatagatatacacacacacatattaactatatgcatagtagtatgtttactacatagtaaataatacatattgttataatataaatatgttacatataatacatattgttataacataaatatatatttataataatacatatcattacaatatgaatatatagtacagattataaatactacatatttattatatagttgcagtattcaagacagggtatatgatattgaggaaaggaatagacacatagataaataaagcataatagagaggtcagaaatagaccctaacaaatatgaccaattaatttcttagtaagtttttttttttttttttgagacagagtgtcgctctggcacaaggctggagtgcagtggcacaatctcagctcactgcaacctctgcttccctggttcaagtgattctgctgcctcagccctcctgagtagctgggactataggcgtgtgccaccacgcccagctaatttttgtatttttagtagagatggggtttcaccatgttggccaggatggtctccatctcttgacctcgtgatctgcccgcctcagcctcccaaagtgctaggattacaggtatgagccatcacgcccggcctttcttaataagttgtaaatgtaattaaatagaaaaatgatagacttttcatcatcatatgggtcatatggacactaataggcaaaaaataaaagaaaaaaatttaaaagaagaaccacagcctaaacatcatactttacataaaaattaactcaaaataggtcatggacttaaatgtaaaatgtaacacaataaaatatttaaaatattagaaaaaattaataaagaatctttagtatctagaattaaacaaagagtttttagacttgcaaccaaaaggactattagtaaaagaaaaaaaaatggtaattgtggcttatttccttctggattcagtgcacccacttttccctgatctgaggatttcagctgtggcccagagaccttctggaaacccagccttcaagcactcatggtcttctctttcacttccatagcctaagtgttctgcttgcccctgcctgagagttcagcctgtgaccctgggacaagcccattccttcccatcatggccagcaccagagccctgggctaacctgaaccctttctttcccatcaggctgattctggactcatacacacagtacatacacacagtccagtgggacatctagggaccggagaattagagaactgcccaccccactccaacattgctggcacctgaccaccttcctcaggacctggggtcgggctgaggcagccattactattaccaaaccacatttgcgcaagcgcaaaggtggaggccctgctttacatgaagaagcagtactgccacattggagaacaggagagccacaaacttatctgaatcaggctgagtgatgaagttctgacccaaaaccattctcaaggagaatcacaaatcagacatttcctaagtctcacatccacattgtaagatctaaattaagagtcacagctgtagaacaggggtgtgatagggcaacagtccacatttctgactccctatgatgaggagctggtgcagctcccccatactccagcaaaggcctcagcaaaattcaccaggagcttcccccagccacaatcgttggggctggtgcctgtgcttgccataggggtaattgtgggccaagcagggactttagctctgccctactctgtcctcccaccaacatagagcaagaagcaaagagcaccgggctcaccactatccaacccatcacctgaaacaacagagagtacctcacagtaaaattaaaagatgagatatgtactgatctgcttgtatcatggctggctctcgtaggttagcattatctattggcctgtaggtcaaatggcacatcccaatgtaagagctgctgacagaggtgcatagggccatagaagcaaaactaaagagccccacccattttactctacagtcacaccacctggaagaggaaagaaaaaccaacagtaatataggaaaagaaagggaataatcgtatctgcatgaaaatgattacacaaattagaagtgccagcatgtccatgaaaaatgtatatgttgtaacagccctaacggatcaaactatctctccagcactggtccccaaccaaaagggaaactcagaaataacaaataaagaattcaaatcatggatgacaaggaagttcaacatagtgaagacaagactgaaaatcaacacgaagaaactattaaaacaatccagaaaatgacagaagagatgaacacattaaagataaatcagtaagagtttatagagttagaaaactcacttaaggaattacaaaatacaatcgaaagctttatcagtaaaacagaccaagcagaaaaatttcagatcttgaaaaattgtttttcaaacaaattcagacaaaattaaagaaaaaagaattaaagaaaatgaacaaagtttttttaaaaatggagttatgtaaagtgactaaacctaccaattattgccattcctgaaagaaagagagaaaaagttaacaatgtggaaaatatgtttgagggaataattcaagaaaaaatttcctaatcttgctagagaggttgaaatccaaatacaataaattcagacaaaacctaggacaggctatacagaatgaacatcaccaagacatgtagtcacgaggtttcaaggtcaacactaaagagaaaaatcttaaagacaatcaggaagaaaaaacaaaaaaaaaaggcctacacaaggtcaacactaaagaaaaaaaaaaaatcaaagactgccagaaaaaagggccaaatatatacaaaggtaaccctgtcaggctaacaatggacttcttagcagaaccactataaggtagaatagattgcagacctattttcagtattcttaaaggaaagaaactccaaccaggagttttatatctcaacaaactaaactttataatatgtgaaggaaaaataaattttttttccaacaagcaagaactaaaggaattccaccagaccagtcttataagagatccttaaggtagttctaagcatggaaattagagaacaatatctgctaccacaaaaataaatatatgcacacagcccagagaccttttaaagcaactacacaaccaagaatacaaagcgaccaattagtaactttatgatagattcgaaacctcacaaataattactaaccttaaatgtaaatagcttaaatagcccacttaaaagacagagtggaaagttggattaaaaaaatagacccatccaactactgtcttcaagagacccaactcataagtaatgacacacataggctcaaagtaaagggctagaaaaagatctaccacacaaatggaaatcaaaaatagtagccgtcactattcttatatcagataaaactgactttaaaccaacaacggtcaaaggacaaataggggcatcacataacaataaagggttcaattcaacaggaaaaaattgactacagtaaatatatatgcatccaatgttggggtacccagattcataaaacaagtagtttcagacctatgaaatattgtagatgacaaacaataacagttgggaacaccatcaccctactggcagtgttagatcattgaggcagaaaaataacaaattctggatgaagattttacacttgaacaattatacctaatagagatctataaaattatccatgcatcaaccagagtaaaattcttctcatctgcatgcagaacatactctaagaccaaacatgctaggccatggagtatcaataatttttttaaaaattgcagccaaaccaagcatactttccagctacagtggaatgcaaatataaatcaatactaagaggatctcttaataccacacaattacatggaaatcaaccaactggtttttaaattgcttttgggtaaacaacaaagtcaaggcagaaataaaaaattacttgaaattaatgaaaatagagatgcaacataccaaaatctctggaatgcagcaaaagcagtgttaaaactttctaatgctaaacacctacatccagaagttagaagaatctcaaattaaaaatcaaacattgaaccttagagaaaactagtaaaaaaataacaaaataaccctaaaagtagcagaagaaaagaaataactaaaatcagaggataatagagtaaattgagacccagaaattcacaccaaagatcaataaacccaaattttcttccttaaaaggataaacaagatcaatacagctagattagattaacaccaaaaaagagagagatccaaataagcacagtcagacatgacaaaagtggcattacaacagaaataaaaaagatcctaagggactactgtgaacatctctatgcacacaagctaggaaatctagtggaaatggatgaagtcctggaaacacacaaactcataatatttaatcagaatgaaattgaaatcctgaacagaacaatatcttgctttgaaattgaatcagtaataaaaacaaaaccctaaagcagatggattcatggccaaattctaccagacatacaaagaagagctggtaccagttctactgaaactactgcaaaaatctgaaagaaaacaaaaaacttacaatgaataaacaaattcaataaatttacaagaaacaaaatcaacatacaacctacaaaaaattgcatttgtatttctatatactaacaacatacaatctgaaaaggatattaaatcaacctcatttataatggaattaatcccattaaaaatagaaataaacttaaccaaggaggtagaagactttttttttttacactgaaaactataatatattagtgaaagaaattagacacatacagatggaaataagtataatgtttatattttggaatcttaatattgtgaaaatatttatgttacacaaagaattggaattctattcccatgaaaatcctagtgacatttcttttagaaatagaaaaatagtcctaaaattcatatggaacaacagaagactcaggatataaaaagtcatcttgagaagaaagaacaaaactggaggcatcacactgcctaacttaaaacatattacaaagctatagtaatcaaaacagtatggtattaggataaagaaagatatacagaacaatgaaacagaattaagagcttggctgcgcatgcatggctcacaactgtaatcacagagaggctgaatagaaaaaacaacgacaaggcccaatgatctgttgcctgtaagtaacacttcacttataatgatatacatagactaaaaataaggggttggaaaaaatatttcaaaccaacagaaaccaaaaaaaaaaaaaaaaagcaggaaaagctatacatagatttccagacaaaaactacaagaagagataaagaaggtcattatataatgataagggtattaattcagcaagaagatatgacaatcgtaaatatgtatgcactaaagcaaatgttattagagctaaacatggagacagacctcattacaataatagctggagacatcagcatccacccagcattagatagatcatacagacaaaaagtcaacagagaaatattcaacttagtgtgcaactatagaccaagtgggcctaagagatattttcagaacacttcattcagtagctgtacaatacacattattttcctcagctcatgaatcattctcaaaataggccatatattatgccacaagagaagttttaaaaaattcaaacaaattgaaattacatcacatattttctctgactacagtggaataaaactagaaataaatatcaagagaaactttgaaaattatattagtacatggaaattaaacaacatgcttctgaatgaccagtgcatcagtgaaaatgtgtagagaaaacttaaaaatttcttgaaacaaatgaaaatggaaacacaacatacccaaaccaagagttacaggatacaaaaccaatgtacaaaaatcagtagcattgctatctatcaacagtggacaacctgaaaaagaaataaagaagtagtctcatctacagtagccccacataaaatatctacgaattcagttaaccaaagaagtgaaagatttctataatgaaaactataaaatagttatgtaagatattgaagaggacacaaaataatgaaaagatattctatgcttatggattggaaaaatcaatattgtggaaatgtccacagtacctaaatcaatttattacttgaatgcaattcttatcaaactaccaatgatattctttacagaaatagaaaaaaattcctaaaatttactcataaccataaacgacccagaatagccaaagctatcctaggcaaaaagaacaaaactggaggaatcacattacctgacttcaaattatacttcagaggaatagtgccaaaacagaatgatactggcatgaaaacagacacatggaccaatggaacagaatagagaacccataaataaatccatacatttatagtgaactcacttttgacaaagttggcaagaacgtacattggtaaacggacagtctcttccataaatggtgctgcaaaactagatacacatttgcagaagaatctagactcctatgacttgccatatataaaattaaatcaaaatacattaatacttaaatgaaaatatattcaaatatataattataaaatacataaaatatagaattacaaaatatgtaattacaaagtagataaaatataaacttacaaaacagattaatacttaaatttaagacttcaaactatcaaactactaaaagaaaacattggagaacctctccaggacattgaacagtacaaagacttctttagtaatagcccagaaaaacaaaacatcaaagtaaacatggacaaatgagtttgcatcaagtttaaaaacttctgcacagcaagtaatacaatttacaaggtaaaaagatgaccaacagaatgggacaaaatatttacaaactttccatttcacaagggattactaatcagaatgtgtgaggacctcaactaattttataagaaaaaaatctaataatccaatttaaaatggcaaaaatctgaataaacattttacaaaagaagacatactaatagcataccagcatatgaaatggtactcaacattactgaccatcagagaaatgcaaatcaaaactacaggatacccacggaaatggccttttatttaaaagataggcactaaacaaaggctggcaaagttgtggagaaaagggaaacttcatacacaattggggaaatgtaaattagtataataactacggagaatggtggttggaggattggaggttcctcaaaatactaaaaatagaactatcatgtgattcagtaatcccattgctagacatatactgaaaagaaagaaaatcaagatagatattgaagagatatgtatattctcatgtttgtttgttgtagtacaattcacaatagccacggtttggaagtaaccgaagtgtccatcaacagatgaatggataaagcaaatgtggtacattggctgggttcagtgtctcaagcctataatcttagcacttcgggaagccgaggcaggtagatcacctgaggtcaggagttcaaaaccagcctggtcaacatggcaaaaccctgtctctactaaaaatacaaaaattagctgggtgtggtggcatgcacctgtaatctcagccactccagaggctgaggcaggataattgattgaatctgggaggtggaggttgcagtgagctgaaattgcaccactgaactccagcctgggcaacagagcaagactctgtctccacccccccccaaaaaaaaaaaagtggtacatatccacaatggagtattattaagccataaaaataatgagatcatgtcagtttcaacaacattaattgaactggagatcattatgttaagtgaaataagcctggcacaggaagacaaactttgcaagttctcacgtatttgcaagatctaaaaattaaaacaattgaacccatggacatagagagtacagtgattattaccagaggctggtaagggtagtgggagtgaggaaagtggggatggttacaacagaatgtatcatacatttaaaaaatctaaacatatataattagattccttgaaacacaaagaaaggataaatacttgaggtgatggataccccatttacgctgatgtggttattatgtactttatgcttgtatcaaaatatctcatgcactctgtaatatgtatatttattatgtacctacaaaaataaatataaaatttttaaattaaagaatataaaagtaaactacaggtcaatactcttgatgaacacagatgcaaaatcctcagcaaaatactaggaaatctaatccggcagcatatcaaaaagttaattcctcatgatcaagtaagctttattcctgggatgcaagtttggctcaaaatacacaaatcaataaattggattcactacatgaaccaaattcacatgatcacttataagagtgagctaaattttgggaacacaaggacataaagatgggaaggataaaacactggggactaccagagggggaagggaaggaagggggcaatgttgaaaaactacctattgtgtattatgctcactatctgggtgaagacaccagttgtgcaacaaaactttgcataatgcaacatacctatgtaacaaatctacacgtgtaccacctgtatctaaaataaaagttgaatttaaaaagaaagaaatggcgagttgttaaaaaatgtgcaatggaatactattcagaaataaataaaactcttgatacatgtaaaaacatgattgaatctctagaaaattatgctgagtgaaaagatgaacctccaaaagcaacatagtttgattccatcatatattattcttaaagtgacaaaattttcagcatggacaacagattatgggttaggaattttgcaggggagtggatgtaattatgaaagggcagcacaagggatctttgtgataacagaagtcctttgtatcttaattgtggtggtatattcgtaaacttatacattataaaattgcattgaactaaatgcacacacataaataactacatgtaaaactcaataagattcataagtctgattgagtgtatcaaaatcaactttccagttgtgatttgtgctctgcctatattaattcctccttcctccgagacctctggcaaccatgaatatttttaccatctccatagttttgtctttttttaggacatcgtgtagttgaaattatatagcatgtcaccttttcagattgtcttattaaggtttctgattagtatataagatttctctattttttatggtttgatgtgttgaataatatctactgtataagttctcacttagcatttaaggtttctctatgtctttttgcttcttttatcattgaataatatttcatcgtatgaatgtacactttaaaaaatctattcacctgctaaaggacatattggtcatttccaagttttaacaattataaataaagctgcaataaacatccatgtgcatatttttgtgagaatatgttttctactcattgggtataaatatcaaggagtgtgactgctgaattttacggtaactgtatacttagtgttgtaagaaactgccaaactatcttccaaagtggctgtgccatttttcattactaccaacaataaatgagagctcctgttgtttgacattctcaccagcacttggtgttgttagtattctggatttttgccattctcataggtatgtagtgaatgttttttattgttttaatttgcaactctaaatgacatgtaacattatgcatcttttcacataaaatttttgtcatctctgcgtcttctttggtgaagtgtcggttcagaactcttgtccattttttcttaattcttgactacaggtgcattctaccacaccagactaatttttttttttattttgcatagagatggggtgttgttatgttgcccaggttagtctcaaatgactgatctcaagtgaccctactgtctcaggctcccagagtgctatgatcacatgcaagaaccaccatgcctggcagtcttttccatttcttaatctagtttcctattttcttattattgaattttaagagttctttgaaaattttagataataaccttttatcagatatgtggtttatcaataatttctcccagtctgaggaaaggaggatagttttatagttattttttaataatatcctgtagtagagatattacaatattacggacaatttggtgaaagtaattttttttttttgagacagagtctcactctctcacccaggctggagtgcagtggcatgatcatggctcactgcagccttgacatcccaggctcaagtgagcctcctatctcagcctctccattagctagaaatgccacatgtgcgccaccacacccggctactttttaaattttttggagagacagcatctcagtatgctgtccaggctggtcttgaactcctggactcaagtggtcctcccaccttggtctcccaaagtgctgggattataagcgtgagccaccatactggcttggtgaaatatttgtattgaatagttaatattagagaagatttgggttagctttacatatatactaaaaaaaatgaaatctcattgtgaagacatttcatgagctaaaacaacaacaaaaaaatacaatctgttgtgctgtattcctgaagtgtagaatttaaaatatttatttgctattaattttcatagaaaaaagtacaagaaatcaggctgttccactacatatatgaacagatagataaaattatttcaaaaacagggtaaagctgtacaatttttaaatgcaattttgtgaatactatttgggaaactttggtttacacacgctggtttctatcatgtttgagcatcaaggtagaatttaaatgatgtcaatacagaagtctctaaaggaagcaaggattatatttatgctttctatgatctggctttagaaactgcacatcctacatattactaatgttttcacaacaaacaaatcagcaaaacaaattttccgaagttttacattgtgtatcttcccataacaacataattaccattgtcatttaaaataatagggagctatttatgtttgtattttcatgtctgacttaatataaataaagctgtaccaaaaaatttgcgatgaattggatagctatttagaatcttgtatttagagacttaacatttattgcaaaattatacatacatacgtaatttttatgcatgcaatgtgtattcctataagatggaagttaaattgaataacattatgagatttgtaaaatgacagtggatctaaaataatccattataatgtccattttacatctcctttattctacttgatagtgatttacaacagaaaacaacaatgttttattatgtattcaaacatagccttcttgatagaaaatatttattaggttatccagcattatactgcatagaatacataaacattcatttttcaattcatgttaatgttttgtatgaaatctgttaaaggaaaacaaatcttggtaagtatatcaataatatactgtatatgattccaaataaataaacaaaattgaagaaatatgtagaatagtaaagtacaattaagaaatacaaaagggcatacaaaatatatgctttgtaaatagcaggacattctagctctagcacaataaaaatgtaaagtttgtctctaagaacatagataaaatttcaactagacaataagtagttaaattacacaataaaaattataaacaaagtaaaagttaaatgtgcataagcaccttcacaacacataaacaaatcaataattgcctaaaccacttttaatttttaacatgcacaaactgaaatataaaataattaatgttaaaatataacaaaacattatttgataaactaatcatccagtattactaaactaaagcttaagtttgagtttatttattgcttaaccctcgtagatttttctttacatactgaaagtacattttaagtaagaaaaaaaggtaggttgtcaaagggtaattgattttaacattaaatttttgttttactgagaaatttaaatgttctaattcagcactccaaaatattaaatactaatttttaaaaattagcagtgttttgccttcatttatattgtttttctatctgagagttaatgaagttgaagcgagtttttcttgaccaccataatgactaaatttctgttggacatagcaatggaaattaataaagttttaatagaacgaatatttcattccttgttaaagacatgatggaatactttaaaagaaaggaagattgctactagatatacataaaacaatgctagtgaatatatatcacaggggagggcaaaattttgtctctttcctcttagagttcttttgctgagtgtcagaattaaactgacataagacggaccaacaggtaaaaagtatgcaaatctagttaatataggttttatgtgacacaggagtcttcataaggaaatgggagatggaaaagatccaaagacagttacagctgatcacttatatactgaattagacaaggagtaataagttacaaaaatgcgacaagtaacaggggcttttactcaacacatcagagcagcatattctagggtggcatcttcttaactcatttcatattaaaaaagtaaaaaagagggtgaactgcatatatccaaagagacaggaaatataattgttctagtattaattttatatttgctatatttcaagtactgtttgaaacacatcgcatgtgcaaatgtatttagtagtcacaagaatcttatgctataagtacttttacttgatttcttcactataacctgtccaaagtcaaagcattagtaggttctggagtaaagattctagtctacacactttggctcaaaagcaactgcttcgtagtgtagtgtacttattccaaacaacagaatcttcaaatacatttaacaactgttttattttttacttgtcttttaattagattatgtgaaaaataaagttagtgagcgctatcactgtttatattttttaagctgaatgttttcaaaaaactcagagtgatgggtatgaagatttaaaggaagcactgggatcacattgttccaggattctttgctccttagttaagctaaaatccaggttcttgtgtcataatcgggaaaaattaggcacaaggacacattgaaagctgaggagagcagaatgtattaaaagaaagagctcagtgaaataaaggggtcctgccaacaggttcccacctcacagattgaatactaggccagcacatgcaagcagaagaggccaggctcctcctccctgcagaagacttgaattcccagggactccaccccattctcccagcagcaggtgggcccttagcctgagccactccacggtgatttattgttgttactgcacatgtgttaagggacagaatttttcaccatgggcatgattaggcaaagcccccagtacacaatgacgtggtagcatttggctgtctcctgcctctatcatttgcccctcaaaagaagtgcatataactgctgttagaataaagataaggataaagatgaagaatgatctgatgacagggggtgctgttttgggaacacaggagtcagagctccctcagaggcctaactttctcctgcaaaaggagccattgtctgaggctctgattgcagactccggttgcatgactggagtttgatggcctgaaggtgacaagagacaaacctcattattagaaaacacgtatcagaaagaaacaaggggggtagagacagctaaaaaatatcaaggccttttaccgatttgcacactaagaggaaggccaagagcccgactggttaaaaaaaaacaaaaaaaaacagtttacccttttgctggcatgttaagcttctggattcccttcccctgagcccaatcctaaaccaaccagtttaaggtttgggaaattaacttttcccagtttggaggatgcatctgaggggagtgtcccatagtacagagacacaattacctaactgtgaagagagggcaaaggaggaaaaagaaggtgtttttttcaaaggagtcccaggggttcaggatgccttagaaaggggtacagactgaagatgaggggctactcatctagaaagaggggagcaagtcatcccaggttccagagatgaaggagggaaattaaggcattcctctttccttcttcctttagtcccagtaaccatgacagggtgccacccatcggtgtcaaagtggctctcacccatgttaatagggggccatggggttcgaatatctgctcttacccacgtacaccctgtctcccctgctgtcaataatcttcgagttccctagacctcatttatgccataggtactagcattacctttattcatcaaacgggaggcttggcttaattggcaggaattagtaatgctccctgcactgtgccttttaacttccattatcatctgcctcgggatccctcagatccagttttccacccaaccgcccctggggcttcaacccaaagcttagaattgagtttgggacaaaattgtgtcttaggggggttgcatgaactccttataagccaaatgctaaggtaaagctgtggaattgagtcctcctccaacaaaggagaaaaaaaatgtcttctgacacacacagatgactggtggctacagttatgcttgctaagatttgggtgcatgggatttggctttggttagctccctcagtcttactttcccaaaaaggtaacctcaggattttggcacactgtttttttccatcatttcacaggatttgcaggataattgctcagaactagaatattgatccagatttttacattaccaattcctttcattctttctgagctgcagctaaagatcactggtttgttcataggaataaccagggttagtttaaaatgtaggcaagaaacttaaaaataactaatgagttaagaatttaatgacaaatgtatggtaagttttgaaacataatttctctctcttcagtcctcatttctgttaaaaacaaatcatgacaggactgagttgtttggaaaatagagtttagttttatacttggcctgattatttgcataaagtgcagcaagaataattatttctacataggcttttaaaattggctttgatggaaatctgttctagaagggatctcagataggactttctaaagtggagcccagacatgggtttgtaccctcaaatacctgtgaattgagtgaactcctctcttcttgaggtgccaaaaacatggggttcctgggccttttagaaagtgacatactttactcaccacaggtttagaaaccatgtatgggaaatgcgtagacaaagcatgaggcaagttttcccaaggggcttttatcagctctgcaagtagagcttgactccttaaagggaagcatatcattccagtgaaagccttcataaaatgaccagtttctccaattgcgtcctgttacaaaagaaggtggattcttattgcactgatgcaaacaattgtatgccataagttaagaatattcacaactagtttccaaactctggagaagccaagcaaagagagagagaaagaaggtcaggcgtggtggctcacgcttgtaatcccagcactttgggagactgaggcgggtggatcatgaggtcaagagagcgagaccatcctggccaacatggtgaaaccccatctctactaaaaatacaaaaattagctgggtgtggtggtgtgcacctgtagttgcagctaacctggaggctgaggcaggagaattacctgaactggggaggcagaggttgcacaactgcactccagcctggcaacagagtgagactctgtctcaaaaacaaaatatatatatatatatatgacctcaggaaaattaaacctcattttggcaaccccaaatacttaaacatgtcaggtaatcctgtttagctcctttctggatcctccaggggctctctgtagaagactctgtgggcacatggcacatggcaatgaatactggccatcctgctgtgtgggacctttgggccatgagtctcagccatggctggcagggaagagagtgggaagccatcaattttggcagaacacccccaatattgcaaatgaaaagataggtgccattacagtcctgaagaaaaggaaaatgccatagaaaagactggatcagatcaaggctgacatatcagacccttgagagcaagccaagcatctggaaagacaattttgaaagtgaagtttgatttgaggaagcctgttaaacatgttagaggtttaaaagacttgatgttatgaaatagaattccagattaccagaaattatttattttgccaaaatgatgactcaaatttttttttaaaaaacaaaaacattttataagccttttaaatttagtcaacgttcacacacagaatttcttttgcaagattaatttcttaaggaactttccatatcttgtttaaacttttagctttatattatctacttaaaaaaacttctttaaccccaggcaaaaatttacattttggtgacatctacattttaccaataatctttaagtttgcttttatttcatgaagattaaagtcacctgaaccaacaggtaccacagctttatcttccatttaaaaagtatttgagctaagcacttattttccttttaagccaattaattagagctcctttgatagacatcacacacaacacatatgtaactacacagacagaagaagatccagttgcgataagattttttgtttgccaatctcctaattggattataggcttccaggtggagccctttaactgtaagggtaggaaagtatgcagtttctagggcccaatacacaagtatagctggaagacaaacacgaatttttagaagaatccatctgcctctaattcctggggctccatgaggtaaacagaggtctctcacaaaggaatccatggtgccttttctgtttttcccaaggagtcccaagccatcagaaattatcttagggtccctaatgtgtgcattaggagcgccaagacaaaatggagaaaaataattcagtcaactgagaaaaaaacctttttccagcaaaacaagatccaagaagagaaaaacataaaagccttttaaatatacctataacttggatacccactattaattaagctgatcattctttaagaaaatacttttaaaacctttattaccccactttagctgatgccaagcggacaatatttttggctttcacattttaccaaaggtaacctcccaggtgctcagagaaccctcccaggttcatggaggggaagaaaatcaataaatggcaaagttcatgcatatatcaaaccagaaaggactcattccttaggccaggattgaatactggctgccactgtaaaatggcagaggctaaaacaaagcactaccacatggttctcccaaggatataaaacaagctagaggcctacagcaaagtttgctactgaccagtttaccaggctaattttaacagagggcttatggagtccgaggcccacatcccatcctaaggtacctgtctttttgacagaaccatacaggaagacatgcaaagcacatcagattggttaaagtctaagaccaacctcacaaatcctttttcatactcaaaactttgcagagaatataaacagtgatagttggggtcctggcctagtaaaacatcttctaaaaggaaaaaagcctctgccatagagagccctctctacttgcagggctgtgttattaggttggtgcaaaagcaatcacctcccctgccatctaagtaatggcaaaaaccacaactgctttgcaccaatacaccaactcctgacctggtggaaaaaaagttaaaaaaaaaagtttaaattgcagggctgcaaggattcttggggtttgaacctcttattcttatgtgagtgggttcctccaatagggagagaaacttttaattgctgttgaactgagctggacctctcggtcaggcaaggggaagactctgtgggcacatggcaaggaatgctggccagcctgccacatcgggcccttgggccatgagtctcagccgtgcctggcagggaagagattgggaagctgccaattttggcagaacactgtcaatattgcaaatgaaaagataggtgccattacagtcctgaaataaaggagaatgccatagaaaagactggatcagatcgaggctgatatcagacccctgagagcaacaccctgggatagggggatgcagctttctctaccctcagaagtctgaggacaagaaggctcagaaatgagaggggaaaagatttttttggtccacactttactcatctttcatcatgtccctgtacaggccaccaaaatgatgcagggttttttgctccttagttcagctaaaatctggcttttagtgtcacaaccagggaaaatgaggcacagagacacactgaaaggtgaggagagcagaatttaataaaagaaaggtctctgtataaaaaaggggtcctgccaacaggctccctcctcacagactgaataccaggccaccaccacactgcgagctgcagaggccaggctcctcccacctgcctaaggtgtgaattcctgctggctccaccctattctccccgtgtgcaggcaagccctcagtctgagccactccgcattgatttacttcccttactgcgcatgtgttaagagacagaatttttcactatgggcatggttaggcaagccccctgtgcacaatcacctgggcaggatttggctgtctcctgtctttatcgatatgagggttaagaaaattcacaaagagaatatccctctcgcatcatcgatacattttggtgaaatgttcagtggcacatatcttccaggaccttgctaaacatacttttgctaagccaatcacttttaaggtgtatttctggctataaagcatttaaaaaaggttccgtgttatcctggatttttatttgatacttatttatacactttaatgttatcggtcataagattgtatgctatcattttgtggatcactattcatacagagaaaacaaatttacaggtgaaattctgcagaagacatttggtgaaatcacattttatgcaagaatgtacaattaatgttccatcactaaaataagaatatgctacctccctttgaaatatggaatacattttaaaataaataactcagatgaagaagcataatattgagatggcattatcagtaagttttatccaaaagttataaatcatgtttcacctgaatgtatttaacctattccaatgctcccattatgtttgaataatggagcaaaatcacatatttccactgattcattagtctttcggaaagtgacaaatttgaaagattactctgacatgaaatacatacaattttatgcaaatacataatttagttccattttatagcatatactgttagctgaaataaaaacggttacatagagaacaccattgtggatgctacactggagaggtgttcaaaaaaggcatcatgtgaagtatttcaaactttgttaattcattatgctgataaattcagacagttaaatttgctttcacacatatttagcctatactgttacatttcaggttaaaagagaataaaactaagatgtattataagcactgtcatatcaattttattaagaaattttctcccaaaatgtctagtggtggtgttttttttttttcccccccaagtctttctctgtcacccaggctggagtgcaatggcgcgatttcggctcactacaacctccgcctcccaggttcaagcaattctcctgccttagtctcctcctgagtagctggaattacaggtgcacgccaacatgcctggctaatttttgtatttttagtagagacgggatttcaccatgttggtgaggctggtctcgaactcctgatctcatgatccgcctgcctcggccccccaaagtgctgatagtgagccaccgtgtctggccctagtttactttttctaagctgtgaccatacgaagtggagtgatgaaaatctagataattctaggtaacatcattgcacctaaaacgtaaaataaatgctaatagagatgatcaggttcaattatattaattttttttctatttccatattactctttgttgataaatctgtagcattatttattttaaaaaacactttcagagtaagacaagttataaaaatatgcaagttgattctatcattgcctccatatgtattttcacaaatttggaataaattcttatttattggaatatagtatgtatgtatgtatttgcatatagattacataaattattcacatagaagtgcattcatgagagagaatgtatgaataaagaaaaacaaaatatataaaaaaataacaatctgcagaaccctagaattcaagatgaagacatttcttgaactgaattctgtatgtaacaggatcagaattccttaaagctcatattgtaatacagctacaagttgtattggatcagaatttttaaggctggagcctattttaaagattcaactattgcgattgagtcacagtgagatgaaattttaaaaagatttcaaggaattataattatctacctaactttaccccaagttagtctgttttctgtattgagctgccataagatttaaacttaaaatacattaatttgctttaaatactaaattcaatgacatttctgatgtttagtgtactataaaaattgtttgggaatataaaggtgaattaaaaatgtttcttatttctgtaaacctctatctcttaaaatcgaaaaagctaagaatagttaaatgcaatttcacaattacatacaaagttttctggggtcaaaaatggaaaagatatagcataatataaggaacagttggcatttgacttataccttgtgtaatgtattaataattgaccataaaatataattaaatacctgctgtgtacaggcactgtacttggtaaacaaaaatggaacaacaaacatagattaaaaaccaaatgttataacaattgaaaacacagattagttaaaatttcaactcttccacctaatagcactgagatctcagaatacctgggttccaatgtggactccattaccaagaaacagtgagaaatttatacaaatgatacacatctgcaaaacatggatcaaaattcttgtcctgagaattgttacaagtattaaagcatgcaaataggttacaaaatgcttgcagagagagtaagcacacaataaatgacaattataatactgttgtaaaagaaacactgcttctattcatatcatcttttctaagactccagtgctaatgagttcttccttacatgaaggtttcacaggagggatttgacatgatttaattatgattgctccctggttgacggcaattataagcactatcaaattgtaagatgcgtctccattttattaatgttaaatgtgcaaaaatatgttttagaattgataaaactgggtaatgttaagagtaatactattagcaatttgatgacagccattcttctaagaaactttaatggggtaaatggaacatagtgtgttagccatagtcttggaatggtgataggtttgaatcagtgaacagcattcagtaactatgtaaacctgagaaaatcttatctcgtaaggtagttataagaattaaaatataacaatgcatggatatactcagcgtattatttgacactttcatggcttaaatattgctttaaaaagttagggatgtgaaaatattcacatgttattatgagtacagcctatggtctgaatgtgttccctgtaattcatttgttaaaaattttatttccaatgcaactgtattgggaggtagggcatctggggaggtgtttaggtgatgagggctccactctcatgaatggattgatgctgttgtaaaaagggctagcaggagtggattccttttctcctcatgttctaccatgtgaggacacagcactcttcccctttttgccctttttgtctgcaatcatgagaaaacacagcaagttggtcctcaccagatgccggatgtcttgatcttgaacctcccagactacagaattgtgacaaataaatttctgctttttataaattacccaatctaacatatttttatagcagaacacaacagactaagacagaatacattgattttataatttaaaaaattacataaaattttaaaataaaattatgtcaaaaatatgatgaaacacatactcgttaactgatatatattttatcttctatatgtgacatagaaaatcaatttttctaaagctgaaaacgctgttgtaatggttaagtttctctagacaaatagccccagttgtttcttgaagagagtgaagagaaaaagagagagagagactatgaggaattggcttgcccagttgtggaggctgagaagtcctacaatctcctttctgcaagatggagacccagggaagccagtggtgtaattcgagtataaatgcttgagaacctgagaagtcaatggtgtaactctcagtctgatagcctaaaatatgagatgagacattccagtttaatccacaaagcaggaaaaaataggaggtggggtgagtttctcctttctccagtttttgttccattcaggccctaaagagacgggaggatgtccatctacattggggagagcgatctattttattgtgtctatagattcaaaacctaatttcatcttgaaacacacacacagacacatccagaaatcatttaatctgagcacctcatgtccaattaaatagacatataaaattaattattacaaccatcttctgagttgagtgcacaacttaaggatttttgcattacatccccaaatactttgatataaatgttacttgataacttccattcagataaatggatgtgatatcgctaatagaacttcaccttgccttttgtccagcctactgtcctactcttgcttctgtttctaataatactttctaaaagctgattgtctgcatttacagtgaagaaaatattctttagcttattagtttattaatttgttcaatgatatttatggggtacctgatattgctcagcatattctacttgtaaggaatagctgcgaaacaagcaaatgaaaaggcattgctgatattaaactaattgttagtgaacatatactttaaaaatacataaaataggttagaaaatgccaagtgttataatgataaataaaacagtaaataaataaggtggccaggtggaaaagtgtttgcaattttaaataagatcataagaaaaccttgtctcataagctgacatttgatcaaagactggaaggaaatgaaggagtgaatcatatagtcatctaaagaaagataatcccaggcaatagaaaaaaaagttccaaatgcctgaggtgatatcttcctcatatatcacaggaaaagcttcagaaaaataaggaagataaagtgttaagagataagatcggagaggtagtatgggtccaaatgatacagggcactgtcacctcaaaaagactttttgttaacattgaataaaaaaggaaggtatcaaacttgcatattaacaggatcactcaggattctgtgttaaaaacagactatgaaaaatcagagtagaagcaggcacactagctatgaggctattgcattagtccaggaagatgtcgacatatggtgatgttaatgaccatgatatggttaattcattttgagtccgcatgttatttcacctctttgacacaattgatcactcactcctctatgacaatttttaaaattttgcttagcctcccaagccataacatttacctagtttcctccccaggagtctagttcaggggagttattttgctgcctccactcccactctggctgagcccagtcagggatatttggcaatatctgaagaaaccttcagttttgtctcacctggggacaggatatgcttctggcatctagtaggtaaaggtcaatgatgctgttaaacatcctacaatgtatgggatagtctcccatatcaaagaattatcaggccccaaatgtcactagtgctgagattgagaaaccatggtttaccttcttgctgattcttgcttattttccagacatttaaatttcgccattggacccagactcagttattggacctcttctctctccatattctctcactgtctaagtgatcactaagttatataagtctgcagtcagaagactcccaaatttacatctcaatcctggacttctacttcaaacaatgctccatctgtccaatggcccattcaaaatatctaacacatagatgtttcttagatctttgcaaattaacaagccacaaactgaactacttctttgttcccagaaacttttctctcatagtctccctatcttgatgagtaacaattccattttttttttttttaggttatttaagccaaaaatactggaacacacttgattcttttccttttgttacattctacattgagtccttcaggaaatcttttctgcttacctttccaaatatatcaacaaatcaatcacttctcatcatgcccactattttcaaactggttcagtatcaattaacttttatttgtagtatttcaacagtttcttaactgtatatccaccttaatttttgtctccaatcgtctattatttatctacccaaaaatctgacaaatgattttagatcttaagtagattttgaaaattctcccaagtcttttctttttactagtaataaaaggcacttaaaaaaaatgatactgggccaggctcggtggctcatgcctgtaatcccagcattttgggaggctgagatgggcggatcacgagattaggagatacagaccattctggccaacatggtgacaccccgtctctactgaaaatacaaaaattagctgggtgtggtggcacacgcctgtaatcccagctactcgggaggctgaggcaggagaatcgcttgaagaggtttcagtgagctgagatcacaccactgcactccagcctggtgacagagggagactccatctcaaaaaaaaaaaaaatgatactaatactcgatgcaaaccaactgattcttactaggattgtttaatcatgacaatgatactcagacttaacagttctgaggagttggtgataaaaagatgtgagaaaaggggaaaaaaaagtgtaaacctgcaggtttatagagtcttcctataataaaagagaaagaagaaatagaaattttagcaaactctgctgggatgcctttttttctgctttgaaagcagaaaatataaacataaccaaacagagtcggtatttcactccttccaatgtttctatctccctgcttttcacatcatcttgctagtgttctgtattcacatttgttcacctgaattactcttatttagagcaaaataaaacttcttcaaactaaaaaagcaaatatattagaaatgtatttctaatgcatttgactattgacataaaaaaagcaatagtcaaaatattatgcaaatacaattttgacaatttttagaaaatgaaaatatgtttttacccagtcacaaaaaaagctattagagctttatggctattgtgttgaaaattttcaggtgtacagaaaaactgaaattggtaatatttttgcatcttttggagaaattcaacaaaaatttaatgttagtaagataacatttcatatgaggaaaatattcaaattgccaaatattttaagtcaaaacacacttgttgaaatttgttagttctagccaatattctttatgttctgaagttatagtgcaaaaatattttgtagagtagacatcctaatcctagctgaaataaacttctcatgatcaattgcatgattacagatctgtaagcagtgtgacaaagtcatgagtcacagtgcaaatgcagtcataatgcaaacacacctaacaaacattcctcagcaacctctcttatgtactgcacatatttaataaacacatttactgtatacccaagaaccacagtaggtagacatgcattccatgaaattaatgtgtcaattaagtgttaaactagttaacggtttccaatagctttgattgtgaactaattcacactaaaagaagtcaaagtaagcacagtgcatttctctttggttgcatagtggattaattaattacttttgcattgaccctacttatagcagcattaggagggggatgaagtatttcgagagaaatataaagtgtcctgataaaggcaatcatgtcagtctttaattttcctaggtggtataaagtagaacgcaagtaaaacaataacctagctccttaaatatcttggatatattgtatccttgattgctgagccctgcaaactggttcatatttaattaagtcagacttggcaaaagcactttctttttaacagtatgtggcttctttctttctttctttcttttgtaacttcaatgctttatattattttataagaaagcaggtataattaacacccatgtgatctggggtctgaaaagtgctttaatataaaacatttctttggagctgaaagtaaaaccatgtctgccgtaaattatgatgttaacttcttttggaactaccccaaacagaaacttccaaataaaattaaattaaggaatatattggtatataatttaaatcaaactgaaaaattatatatttcctaaactaatatcaaaagtatttacatacatttaacttaattaaattaggaagtgaggttttcattacatttttattatatctcacttgtaatttataaattctggattcattttcatttttatttttatttaaatttgcatttctttttcatgagactcattcttttgtgtaaagattgcaaccagaatagcatccttagaaacatgattattttactctggatcaacaatagcataactaattcattatttcctattaagcagaataatgacatgaattacttaatataaaataataatgaaatttggctaaagtgcctataaacttagatataatccagtaattaaataagtataaaaaatttaatattgtagttaaatcttatgcttagtctactttttaaaatatattttatcttttagagaagttttaagttcacaacaaagcgagcagaaacagtacaaatttctcatatactcccttccccttcacatgcaaagccttcatcatttctcaaatcccccaccagagtggtacctttattacaactgatgagcctacgttgacacatcaacattacccagagtccatagtttacattagtgtccagtcttagtgttatacattctatgggtttggacaaatatatcatgatatgtatccaccattatggtatcattttactacactacagaatcattttactacactaagaattatctgttgcctgcctatttactctcccctttcccttaaaccatgcaaccgctgatcttcttgttgtctctatggttttgtcttttccagattattatatagttgggatcacacagtatgtagaatttaaggcagatgtttttcatttcttgttagcactaaattatattctactgtctgaaagtaccataagttatttacctactcaccttcttaaggacatcttagttgcttgcaagttttggcagttataagtgaagctgcatctgtgcgcaggtttatgtgtgaaagtaagttttaaacccctttgggtaaattccaaggaccacaattactggctcctatgttaagagttagtttccttttgaaagaaactgactatcttccaaagtgactgcaccattttgcattcccaccagcaataaatgaaagttcctgttgctccacatccttgcctgcatttagttttgtcagtgttctggtttgggctattctaatagtgttacagtaggtagctagtcagacatgagcaaggtatacacacactgggaatgttaggcggccatcagatggtagtcaggcagtcaactgtccttctgaaatataaccagtacaagggcaagcagtctcccaataaacagaaacacctgaagctggtgatcagcagcttcctgataagatgtcaggagttgggtgaatgggctccagcatgtgtactaagaggcaaaatgttggagtttaagtggtatactactttctggggacatttgattggtaaaacaagacaccttaagtgaacatgtgtacaactctagtaaacacactgtgcatgctcacctcccaagtgcgagcaggccactgcacctgcagacagcccacctcatgggaagaattggggagaagaaacacatgacctcagaagcatgccaacatatacagacccaagtcaaaaggtccaaccatgcacttaatccctcaagccacccacttggccctatttcaagtgtacttcacttcctttcattcctgttaaaaagctttttagaatactttcacttctgctctaacttgccttggtctcttctgccttttacccctcagttgaatttttttcttctgaggaggcaaaagttgaggttgctgcagacccttaggaattcattgccggcaacaataggtgtcccacttttaatttcaatattgcctctttaatcatggatgatattcattgttcatgactattcatattttaagatattaatgtctattcacatttacagtggtttattgcaaaagaaataactaaccataatatactctttagattgttttgtatatgaatattctaactaaaaacacaagatttatgcaataaaaatgatatacagtaaatgcatttattatctcacttatttaggccaacgcatacatgtgccacaggcatatggattattaccttctataatagcagggacacatgctcatcaagatccacagcagtcacaaactaagaccctactaagaatggtgctgtctaggttttggcagtgccaaggtgcacaaccataaaaaaggaaaatctggagtattttgttacttgctttataacagctgagagcagaaaacaaggtaaggatgcaggttactgtttctcacgtgcttcaatctttaaatcagaaaataaactcttctgctgaagtacattaacaaagctccatgaacatctcattagccagaagtgttcacacaccttctctaaatcaattgattgacaaaagggaattcaattataataataggcctggagtaggcactttgctgctgaaagaaaactggagttctgaaaactaagaaaggaagaatgactgcttgatggttttgaaggattctgccacatgtatctccatttacaatcaagtgatgccatctcacatgtaataatttcatttaaaatgtttgtaaaatgacaaacttatttgtaagaaatatttctttaaaaacacaaaaaattagatttgaattaaacagcttattttaggaaatcgttcaattaagctttctggaagaatgtaaatatattcaatcacatgcaactcaaacttttaactggaaaacttgaaagtaaaaaggtgtgatgaacaaccataaagcagaaactagaagcatctgcttttgctcatgtagggagaaattggagactgttgctgttgttgttgttgttgagtagatgagtttatcaggacttacatatcagggagtcctgggtggcagtgagatagctctagagatcggtaccgctaatcatctctaagctgcttattttttttttattttttatgtatttatttttgagatagggtctcactccgtcacccaggatggggcgcagtggtgtgattatggctcactgcagccgtgaactcccaggttcaattgatcctcctaccttaacatactgtgtagctaggactataggctaattttcacattttgtagagatggaattttgctatgttgctcagggtggtctcaagctcctgggcacaagtggttctcctgcctcggcctcccaaagtgctgaaattacaggcatgagccaccgcacccagcctctaagttgctttttttttttttcttttttcttttttgagatagggtctcactctgttgcccaagctgaagtgcagtgcatcaatcttggctcactgcaacctctgctccccaccctactgcccacgaccacaggcacacatcaccacccctggctatttttatgtattttcgcagagacagagtctcaccatgttcccaggctggtctccaacccctgagctcaagcaatccacccttcttggcctccaaaagtgctgggattacagctgtgagccattgcgtcctgccacctaaactactattaagctaattttcttgatctttgcatatggtgtttgtgcagtgagactgtttttcttcacatttcagaatgttattatttttattgatttgtcattttaagaaataagtatgaatccaatgagcattgatagaaaagaaaacctcaaatattttatttgtttcgttgtactgaatagaaattttctcagaataatgaaggcagaaaaaaagaaatattttcatgcttatggtgtcatagtttagcagggtgaagagaaaagaccctgaacaaaggaagccaagggttctggctgaccaaacaaaccaaccttccctaaagaagaaacgagacacatgaaaaaatgctcaacataactggccatcagagaaatgcaaatcaaaaccacaatgagataccatctcacaccagttagaatggcaatcattgaaaagtcaggaaacaacaggtgctggagaggatgtggagaaataggaacacttttacactgttggtgggactgtaaactagttcaatcattgtggaagacagtgtggtgattcctcagggatctagaactagaaatactatttgacctagccatcccattactgggtatatacccaaaggattataaataatgcttctgtaaaggcacatgcacacgtatgtttattgtggcactattcacaatagcaaagacttggaaccaacccaaatgtccatcaatgatagactggattaagaaaatgtggcacatacacaccatggaatactatgcagccataaaaaaggatgagttcatgtcctttgtggggacatggatgaagctggaaaccatcattctgagcaaactatcgcaaggtcagaaaaccaaacactgcatgttctcactcataggtgggaaatgaacaatgagaacacttggacacaggaaggggaacatcacacaccgcggcctgttgtggggtgggggaagcggggagggaaagcattaggagatatacctaatgtaaatgacgagttaatgggtgcagcacaccaacacggcacatgtatacatatgtaacaaacctgcacattgtgcacatgtaccctagaacttaaagtataataattaaaaaaaaaaaagaagaagaaacgaccacagtcggataactcttattttcaattctttcagtgttttccacagaaacagcaaaagggcatttcttagacctgaagtgggtgccaaaccagcaatggaacagaaacttgaataacctttcctctaagaatacatattgtgcaaagagttttgttgtcctcataggaaaattaggctactctgaatagactatatgtgtgtgtgtatatatattcatacacacatatagaatataaataggaatagaatcgaatatatatgactatacatatatggtatatatgaatatacatatatgaatagatatcatatatgatatatgtgtatcacatatataaaaggcaggaaaatataatatccactatattttattctttgattgctcgacacccagaaaccattcttcacattaatttatttcaaaatttaacctgccaaacaacaatgcctgtttgactgagtttacattcattgcccatccacagaaatacaatgtgatgtgttctatttagcgcattctaggacatagagatagtgcttttctcatctcctacaatgtctcggtattatatcaaagtaaactaaaaggcaaatgtattcataaagacatctacataaaatgttaatgcaaaataaaagtaaaaatgatgatacaagtaaaaaaagtgataaattaatatgcttgcctagacatacacacacagacagtataaagatgggattataagcacaggctatggtcttcatgtaacttattatgtaatgtgttatcttctgagattgcttttcatgaatttccatattataaccctctccatattcccttttgctttagccagcatatggaacgattctacttattaccagaggtaatgttcagctttgattttaaacattttttgtagcttatgttaggatcattttctgtgtttctccatggctgtactgctggcgtgataggaaaggaaggcacaccaacatattcttgggatatggtcagggttcatgtctgacactatctggtacctttaatcctatttttgctaaaaatgcagaaccaataactataagcagaaataaccctgttttactacttgtttacctcaaatgtttaagtgaatgtttttcccaatcagtggcattattcattttttccatgatccaaatattaatatttggagaatcaaatattctaaacacagaacagaacacatttttaatagaaattgtttgaataagctgcatttcttacaactttatcatacattggtggttttacgtgttggatgtgtgttcatgttttccaacacatacatgggttcccatgcttctctttcttaatctttctgttttaccttaccattcctttttttcttatttttcttttccctatatcatagaactgatagtttgattgacttagtgtttaatataaacacgtttggcattctctctttttgagtataaagatgtacaagtaaagcatgttgtatttctattttaatctagaattctagaataagatggttctcaattattttaaatatttctcagtccagatataataatgcgctttccagttctcttgaggaattttgcatttcataagcaactacaaacccacaaatgaaacatatcacagcaggtgataagcagggtaggaaatttataaaatatgttatttctagatatatttgaaagttaaaggaaaatggtcctcttattaaagttaaactttggttgttaaagaagtagataaaagtaaaagaaagtaaaattctagcttcttgaattttagtctaagtggaatagaagtacccaaagttctcatcttgataaaatagagttcctctgttacattttcacggtcaacaaatttacaatgttgaagtggaatatcaaaatgcttttagcaatacccacagatgtgagacattataatagagctttgcttaggatagcaatgccaacagatatgtaaatgtataatttttggccttggcacaggaaaaatgactgacgaaatttttgaaatattttccattacagcatatctgttggggtagaatggtttgggtttacttaatttcacagccttttcatagtaagaagaatggccataatttttagaactgtagggcctcaaacatgagtcagatgattttaggtaacaatttttaccatagtggaataaatttattttattaaaaatatggtaatcttataaattatgatacaagatattttgatatccagaatttgtacttcccaaatcatctttgaaagtaattgtgcaaagaaaacttatttcaggccaggcgtggtggctcacgcctgaaatcccagcggaggccgaggtgggtggatcgcgaggtcaagagatcaagaacatcctggccaacatggggaaaccccgtctctactaaaaacacaaaaattagctgggtgtggtggcatgcctgcagtcccagctacttgggaggctgaggcaggagaatcgtttgaacccaggaggcagaggttgcagtgagctgagatcatgccactgtactccagcctgggcgacagggtgagactccatctcaaaaaaaaataaaaataaaaacctatttcagagagcatacttaagttactagagtttcaattcaagaaataacatagggttttaaaaacatcttttaatagagaatataaaaatcattttgattgaaaatttaacctattagatttttcaaatagataaatgttatttaaaatacatgtattattattatgacaacatgattagaaatgttttcatggaagattgtgcttcttagctaaggatattttaggtaaaaatcagaaaagtaagttgcctaaaaattccttgagagaagtacaatcttcttaactattttctgctctccaaagtgcctagactagagaaatgtacttcaggaaacacttgatacatacttgttgatgactgaaagaaactcatgtactattataaagttaataactaaatacaaatatgtttgaccacttttttgtaacatatattttatatttagatattttcaccatcttaaagacattcacacagaaggatcaattcctgtaggaaaacaagaagtaacaaactcattgaaacacatatttcataatttttacaagaagggttttgccctgatgagcgggtttatgttttggtaatactatgtatttacatgagtataaacatatttgacagttttagacattctttcttttagtattgaaaaacattaataattcaatcaacgatttatacaattttaatatgattaatatagacttatatgaaagagatcttaactttagtgaatttaaacaataaaaaactgtaatataaaatcactttttaacacgagtgaatagatatcattggtatgttcagtcatgtaagaatgacggagaaccaaggttttaattttcgtgttagcattcagatttaaataattattaaggaaatttttcttagtattttatagagttaagagtatttttaattattcataccaaaaagaatacagcagaagttttatttaaagtagaaatatttaattgtgttgacttaggaagagactgacatattgcttaaattaaaaatggtttatatttacaaactttaaactctggctactcataagttcataacattgtaaagccatagcctccaaaggtgaagaataagaattcaaattctggctgggcacggtggctcacgcctgtaatcccagcacaatgggagatcaaggtgggaggactgcttgagccaaggagttcgagaaaagagggtaacatgataaaaacccatctctacaaaaaatacaaaaattagctgggaatggtagtgtacgcctgtagtcctggctacctgggaggctgaggtgggaggatcacttgagcccaggtcatcgaggctgcagtgagccctgatcacacttttgcactctggcctgggcaacagagtgagacctggttccaaaataaaaaaaagttaaattctgttaaaatggtaggattggtaggatggtgcaaaataaagatagtgtagacagacgtacatcgacatcaatggttaagacatcatgttctttggagtttctaagtatgaaatgacttttacttgtaaacatatagttcatatacacctaacatataatttacgatgttacatttatatgtctttgattatgttgacactaactagcatttgcatgcagacattttttttttcttagtaatatcccctgctatgaaattttatcttgagtctatctaacatttataaagtcttgaaattggataattgttgcttctcttttagaattactttcattatttagtacaactctgataactctagtagtaaataactcatacctctttacatagaagagtctttgttaaggataaagtttccatagttgttgttcaatgggtataaagtttcagttatacgagacaaataagttgtggatgtctgctgtacaacatggtgctcctagttaacgatacagtatagtatagcactttaaaattttaaggggcagatctcatgttaagtattgttaccacaagtacacacatgaaaactgacaagtgctggacatgtgtattacctcgattgtgatgatagtatcacaaatgtttgcatgtgtctaaacttaccaaattgtatacagtaatatatgaggttatttgtatatcaataatacctcaataaagctgataaaaatgcaaaagaaagcaaaaataagtaaatctgggttcaacattcaatattgtttattcaaatctggaccagtgaacaacaaaccattataactgagaaaggtagaactgacatttctagttaacaactatgattcctgtagtcagattttctgagttagaatcctgggttagaatccttccctgcaaattgcatgacttttgggtgattacttaatctcagtgaacaacaggtattttatcttgaaaatagggatgaaaataacctctgttcaaatgatgtaattaatgtaatgtgatataacggaaacagttatagtactaacatgctcaataaacattagtttttattatctcttaagagtgctcattctgaatatgtccaattctaatgattttcttttcttccttattaaggaatgcaacagtgatgacaattatacattgttttctctgaagctggactgcctggaatctgccatgtttcagccatggccttacattaatcacttgccatttctaagtttcagttgcttttatttaaaatgtggtaaataccagtgagtgcttaatgcccagagttttctgaggtttgaagaatcaatatatttaaagcaatttataaagagtttaaggcatatttatcataatgatattatattatttaattttaaacaccactgttttatatttaaaatatatacatactttgtgaattttaattttttatagggaaaaacatcatctgaaactgtttgttgtcttcctttcaatatgaagaaaaacgcagagctatttataaaactttgaccaaactttgattttacaccattttgtacagtaggatggcaagattacattaaagcagttaatctgtcaggcgtggtggtacgtgcctgtagtctcagttacttgggaggctgaggcaagaggatcagttgagcccaggaattctagtacagacttggcaacaaagtgaaaccctgctcataaaataaaaaataaaaacaaataaataaataattaaaatttaaaactataacttcatgggaaaaatattctatctaaaaccaaacagttctgtaaaacagtagaaactttttaagtacttattaaaatatttttagaatttaaaaactgcctgtgtaaactgtaatactatataaaagcatgtgagacactagcttaaaaacaataatgaagaatatggctccaatcaaagttattataattcctttttcctgtactgtgcaacaaaagaatatatagaagcaaagaagaaggaaaacagctataacaacaaataataggcagccagaaatttacatgaaaaagcttgatggaaaagaactactgtgtagaaaataaaagaaatagtataaaaatgtgctttttaaatagaaaacatacttaaattccatcttgagaaataattctaaatcatatttaatagtacaataaatttagagaggcaattatagtacactgcatgccagcctattaataatttttaggctgaccatttaagggagcaaaagtgttttgaatagtttttcacttttctttgtcatgaccgaactgcactagatttagtctagtgctgattatcacctctcaagaaattctttacccattgcattagttttcttccttcattctttcttttgcaagctaacatgagttattctacagcgaataatgtgagtataaggtaacacacattttgaccttactctgcagtctgagaattgttgagcatgatagtgatgtgaatttgggttctattataatatgaattattctggtcattatttactgaaaagaattagacattaagataaagatatgcaagacaagcaaaaaggtgttactaagacccaggctcttagtagacaataactaatttttgtcctcctatttagatactttggctttcattttccccccaaatttagagtgcagagattgacagagaaaatacactctgattattattactaattgtaccacagggttctgatatcatgaagtgtgaaactggaatagcacaggtctggttaattattttacttaggtaattctagattttttaaaagaggttttattataactttaattttaaatctatatttatgtttcatttgttcatacatacaaagctgacaataactaagattgttactttctaagtattaaagatttgtctttaattatttggaccatgttcacaattttagtgtgcttaggttatatgtttgacggaaattcattttgtaaggataaaaacaataaaactagcctataattttatattttagagataattttctataatatttttgttgtgacatttaaaaatgagttacaaaactcactttatgctgcttttttcactaaataagtaccaatgcatttttcttgcaataaagaatatatatggcatcaagttaaagaatagataacatacactgagtgatttttcccatttatatgtattaattttttaaaagttgtttgctcttttattaatttttaaaaattatttttataaatgtttcttagtacataggaggtgtatatatatattaacacagtacatgagatgtttttatacagtatgcaatgtgaaataaccacatcacgaagaatggagtattcatccccttaagcatttatcttttgacttgcaattgatccaattacactcttcgagttttttaaaaatatacaattaaattattattgactatagtcaccctattgtgctataaagtagtaggtcttattcattctttctattttttttttaacccatcaactatccccaactgcccctcaacatttccctacccttcccagcctctggtaaccgtacttctgctctctgtattcatgagttcaatagatttgatttttagatatcacaaataagtgagaacatgtgatgtctgtctttccatggctagctgaattcacttaacataataatatctttaggtgtcctttacaatttccttcattagtgttttatagttttcattaatgagatattttacttctttggtttactcacatatatttaattttatttctttctattgtaattttctttgtgtctgtttcatccatgttgctgcaaatgacatgatctcattcttttttatgcagaatagtaattcattgtgtatattaccacattttctttatccattcatctattgaggaacactgaggttgctttccaatcttagctattgtaaacagtgctggaacaaacataggagtgcagctatctctctgatatactgatttcctttcttttaggtatatatccagcattgggattgctggatcatatagtagctctatttttagatttttgaggaacctccaaactgttcttagtggttgtactaatttacattcccaccgattgtgtacaagtgttctttttctccacatcttcaccagtatttgttattgcctgtcttttggaaataaaccgttttaactggggtgagataatatatcattgtagttttgatttgcattactttaatgaccagtgatgttgagcatctttttatatgaccatttgccatttatatgtcttcttttaaaaaatgtctattcaaatattttagacaattttttgatcagattagctgatcaaaagtagctgagattacaggcatgcgccaccatgtccagctaatttttttgtatttttaagagacggggtttctccatgttggtcaggctggtctcgaactcccaacctcaggtgatccactcgccttggcctccaaaagtgctgggattacaggcgtgagccaccacgcctggctgatcttcacactttttgaccactcagagagaggtccatctacgtacctcttcccccaaatttctttgtcaccaatttttctctcatgcttcttccaagtccctgaccatccagccaaaccattggctacagtccatgaatcagtatataatcacacatctggtcatttctccttcaacgcaaagtgcacaaccaggtccactgctcaaagttctgcccactgggaggatttcctttcactgctgtgcttcagggatgtcctagaaaggggctgtagtgctgcagctgtccacttttgggtggtgcctgcatatcatgcagagtcatctgtgaaccaggccctagtcttctcttcctctgtcaactgatcatagggaactccccatgaggccatcggtgcaggctgggggagagaaggcaaggtggcaggagtgaagaccatgggcatttgagccacttccttgtgtaacttacttgtgccttcaggacctgctcaagcccaatcacatatataccacttccaaggtcatccaagacctgagtgggtctagagatgccatccaggagtcagagactggagtcaaaagttttagaagtctaccttgtattctattgtattgtagctgagctggcactcaaaccacaggacactatcattcccactctttccaaagacagagaggcttcactccatagccactacaactccgggctgtgaggagtactgccaaactaccaccgatgtacccttaaggctcaaggaagggctcttaagtcagcttgttgtgaatgatgcctggcctgggactcgcccttcaggtcagcaggctcctttctggcccagggaaggtccagaagttccatgaaaagttcaagtcctggaatcagggacccaaagaggtcacttggtgctctaccttcctgtggttaggctggtacctaaggttcaagataaagtcccctttactttccttctgcttttctcaagcagaaggggttttgccttgtagccactatggccagctatgtactgaatttcacttgaagccatcaagtcagaggttcatccaaggcgctcgatttaggacctgggtattgctgctggttattcaggacccaaggattcttcaattaccaggtgttgaatgctgcccagactgggttctttcctttaaggcagtgggttcccttctggcccaaggtatgtctagaaatgtcatcttggagctaggtcctggaacaatggccctcccaactctaaccagtatcttaacctgttgtggctgggctggtattctagatccaagacaaagtcctccccactcttccttctcttctccttaagcagaagaaaaaggtgttttttggaacttcaagctgtgcagcctggggttagggtaagggtgatgccagctctcccttagtcaccccagctggtgcctcagtatgtcacatgcccctcagtccactgtctctgggcctagttcaggactcacctaatagttgcagtctttatggtctagactgcctttcaagttctcttggaggcacagagcattttggctcgcagtggtggtttgcatctcttcagtgcctcttgaagcggtatggagtttacagtgttaaataaaaccaggtgctatgagtgctcacctgatgtttgcttctaacgagggtgtgtttatttaactttcattttattttaacatttaggtttgggggtacatgtgaaggtttgttatataggtatacttgtgtcatgggggtttgttgtatgagggtgtttttttctgtgtagacagttttaacttggtatctttttgcgggggcgtcgagatgggtggagctttctattttgccattttgctccaccctgcgtttccagagtgttaagaatgagtcagaaactgttcttagccatgacttgtgttatctcatttattcttcatgagccatctgttaaactaaatttggtgtgaggatgcctcctacttgagaccttatgtaatgaactgcaacctaacttagcatttcaactgtctgagagcctaactagagtatacttttataacaaatagctgaggctcagccaatcacagcagtcaagattcaatcagtcacaggcagccaacttatcagaccatgttcaaataaggtagctgatgggctctaatcaatgaagctgcctttagacctcatttttgttgtctgtccatcaatgctgcctgcccacattggaggccacagctctctgaagctcttctcattctgagggttgcctgattcaccgatcattctttgctctgttaaattctgctagatttaatttgcccagagtttttcttttaacacactttctgagataggtggagataacatgatcatcaaacattattatcattttattctctttcccaaatgaagacactgagtcacagacaagaaaagaactcagcctactactaatagtaaatttgaaagtgagaatttgaagcttggtagtctggattgtgagcctgtataattaaacccatgcttggcttatttaaagccacgtaatgtgtgaactatcatttatttaaattgatacttcaagttttcagtgtcttttatttgaaaacaaaactgtcattgtaaacaattccaaatcttgccattagagagtatgaatttttttaagaattctataaggtagatatattttaagtttttacttcatttgcactccttagattataatggaggtaaattatcaatgaaatttcattggtaaatttaatcattcttctgcgaattcatttctgaagttttcaaatttctctcattaggtttgttcttgtttttcttgcatacctgagtttcccttcacttcttaaaggacatgaacacagcctcccaatgccttggttctttcccagaaacacatttaaatacttgttgagaacaaataaccactgagtatacataagactatctgttgccaacctttctctatagtgtctgaaaatttttatacattatcttaagaaacaaaatggacagacataaaggcaatataacagatgaaaatttaagtgacctgaataaataaatgattagttattgcctgttctaaaaaaatgataactcagtgtcataaaattgtaagttccctttattttataaatcaaggcaataaaaataaaccatgacgttttgaggaaggtagcagttaacaagatgattctaaaatttatctggtaaaataggagagtgagaaataaatgcaaatatctatgagaatttgggggaagggagattgacaaggggtatagttttactagacaataaaacatagaatatagtaattgaaacatttatagtactaactgaagaaaagatgagtcaataaaaataataaaaatatctgaaataaatacaaacacgagataatttattataagagatatgaaatggataccagtagaagttagttttaccattatgtatgatgttgggaaaagttattagatatgtggaaataataataatagtgatgacagttttatcactacttttatcatagtgctagattatactcacgttttactcaaatttaggcatacaaaggtgtggtctgagagggcatttctaatatgccacaaaattagaaatatacattatttacgtacatttgtctgcattataattaaatatttctttggttataaaaaagaaagtaaacagtttaaaagtgtatcacatctgacagatagaggctaacttaataaaaagatttataatagttagcaatcaacataataacataataaaaagatttctacctaacgaaagacaaacacattaacttataattattctttttttgtttgtttgttttttgtttgagaaggggtcttgctctgtcacccaggctggagtgcagtagcgcaatctcacctcactgcaacatttgcctgctcggcccaagcaatcctctcacctcagcctcctgagtaggtggaagcacagctgagtgccatcacacctggctattgttgtttttttttgtatttttgttagaggtgaggtttcatcatgttgcccaggcttgtctcaaactcctgaactcaagcaatcaacttgccttggcctcccaaatttctgggattacaggcatgagccaccatgcccagccatgaactaatatttcatacaaaagaaatataaatatccaacacatgtatgaaagctatttcttaattaagaactgcaaattgaaaccctaagagatcccagcattcatgtatcagattattgtattaaaatttttatcaataccaaatatagacaaaagtacatagaaggaaatatcttgtgtatgctgaaggtagtataaatttggttgtggattcctggtagtccagagatgatgtgagagaacaacctgaatgataaaaatttccacacagaatggcggcagaccagttagtccaagtggtctcagaacaatacccttgagagaggacatctcggtgctacccttggttgttggagccccagtgaagtaaggaaagtgtccctgctggggagagaggccaggcttgggaggtgggggtgactcacccaaggttccaaagcccaagccaggacatgtgagttatttctttaaaccacatatcttgggaaggcccaggcatcagtctttatgtttaaagtctttgccgaaatccaagatttacatatcaagatatcccaagaattctagtctcttggattgtggagtccattatagaaatccaaccaggaaacaaaaccttagcttcaaattcttaataatactcatttttcatagtggctctcttagagccaggttctcctccactgaaccagaaaggaggaaaagcactttcctctgttttatggctctgaagagccacagcagttttacctaggaggaaaaggaccccagattcctaggttttttgcatgtatcctactttccattcactttatttatgttggaaagcagtggttgatccagcacttggtaataggaacattttttccctcttttagtaaactcatggttaatacctgtccaaattatttttgcctctctttcgaaggtgggggactcaacaactattttcttttctagctttggcttctgattaataattctgtcaactatcccaaatccagagtaacaggaaaagcttaatcaacatcccattatatactaatctattgaagtctgaaagaaataacataaaataagaaagttactatgagaaggattagattgttaatttcaatatatagtccactatgtttttaccaccataaccctttttagtgagtgcatatttcatttataatttcagaaatagggaggaggagcagggaaagaaaaaaaaaagtctcattgaataagtatttttctttccttaaagtaatctttgcctttaccacaaatctttctcctttgagattatttatttctaacattcctggagtgttagaagtattagcagtgaaaacattatccattaatactttaggggtaaaaaaagacagtgtttgagcaaaatgcagaatacatagtaaacatggggatttttgctgtagggaactgtagtcaaatttgcttgtccccagtgggccagtttgccaacttgtgtgtgcttgagagctaacatttcctgtccttacctctctgtgctccttaatgcctgccttgcttgctcctgcatttgatatcagcatgccactagattactgtcaaacgttttctagccagacattagtttgatgacctctctgcttttttcacactttgtgtgattgaacccagctaaaacatgaaatcaactaactctcaggacagtacttttaactcatgactgaagccactctgcctataaaaaaatctgttcccaccaggaacaaacattttcttcaccaactacatttcccagtgattgtttgcaatggtataagaacaaaatacagttgtatgagtggcagaattattgccttctttcatttccattttgacactgacaagagtatctgtgatgtaccctaaatcataaagctctgctatacatacattcatataaaatgaaacagattgggtattatcaagacattgataaaatgtatattaaaattgaaagcatgtgctgttttgctactggaacactgaaaaacaaacattggacctgtgtgagtttataaaaaataagcaaaaattgcacagagttcaattatttttaaaaataagaatactgaaagataaggtttcctcaaagattagtgttatttacatgtatccaatatttggaatgcacagtgtaatacatttggcatggctatagttagaaacgtggagaaaatatttgctgtccataaactctcatttggttaaatggagaaatacaatatccttctttatttgttgtccgtgggtaattcttcagtgcatacagttacataaaaatcctaagtttttaaaattggttttgtctgaaattatacataggcaatcctcactttgcatggttctgatatttacaaaatttacttactactgttagttcattaaaatcagtccccacaaaacatggttgaaatttgtcatcaaggtgtattaatccatttttatactgctataaaaaaactgcctgaaacttggaaatttataaagaaaaaagctttaattgactcatagttctgcatggctagggaagcctcaggaaacttacaatcatggtggaagtcacctcttcacaaggcagcaagagtgagaatgagtgccaagcgaagggggaagccccttataaaaccatcagattttctgagaattcactcactatcatgagaacagtatgtgggaaatgacccccttgattcaattatctctacctggccttgcccttgacacacaggtattattacaactcaggatgaaatttgggtggacacacagccaatcacatcattccacccctggctcctcccaaatctcatgtcctcacatttcaaaacacaattatgccttcccgacagtcccctaaagtcttaactcattccagccttaaaccaaaagcccaagtccaaagtttcatctgagacaaggcaagtcccttctgcctatgagcctgtaaaatcagaagaaagttagtttcttcctagatacaatagctatacaggcattaggtaaatatagacttccaaatgagataaattggccaaaacaaaggggctacaggccccatccaagtccgaaatccaatagggcagtcattaaaccttaaatttataaaatgatctcctttgacgccatatctcacatccaggaaacacttatgcaagaggtaggctcccacaaccttgggcagctctgcctttgtggctttgcagggtacagctcccttcccagctgctttcatggctggcattgagtgtttgcagctcttccagggcacagtgcaagctatctgtggatctaccattctggggtctggaaaaaggttgccctcttctcatagctcctctagccaatgctccagtagggactctgtgagggagctgtcaccccacatttcccttccacactgccttagcagaggatctccatgagggttccacccctgcagcacacccctgcctggacatccaggtgtttaccatacatcctctgaaatctaggcagaggttcccaaacctcaattctcgtcttctacacacaccagaccaacaacacatggaagttgccaaggcttggggcttgcaccctctgaagccacagcctgagctgtaggttggccccttttagccatggctggaatggctgggatgcaggacaccaagtcccaaggctgcacacagtaatggggccctggggctggcccagaaaaccgattttctcttctacatctcagggtctgggatggaggtctctgatatgccctggagactttttccccattgtcttagtgattagcatttggctccttgttacttctgccaatttctccagccagcttgaatttcttcccacaaaacgggtttttcttttctactgcattgtcagcctgcaaatttttcaaacttttattctctgtcacctcttgaatgcttttctgcttagaaatttcttccaccagataccctaaatcatctttcccaaattcaaagttccacagatctctaggagaggggcaaaataccaccagtctctttgcatagcaagagtgacctttactccagttcccaacaagttcctcatctccctctgagaccaactcatcctggatttcattgtccatatcactaacagcattttggtcaaagccattcaacaagtctctaggaagttccaaacttttccacattttcctgtcttcttctgagccctcaaaactgttccaacctctgcctgttaacccagctctaaagttgcttccatatttttgggtatctttatagaagcaccccactctctgtggtaccaatttacggtattagttcattttcatattgctataaagaactgcctgagtataggtaatttataaagaaaagaggtttaattgactcacagttctgcatggctggggggcctcaggaaacttacaatcatggcagaaggaacctctttacagggcgtcaggagagagaatgagtgccgaaggaaggggcaattctcttataaaaccatcagatctcgtgagaactcactcactatcatgagagcaatatacgggaaaggactcgggtgattcaattatcttcacgtggtcccacccttgacagctgggggttgttacaattccagatgagatttgggtggagacacagccaaaccatatcacaaggtgtattaactgtagttaattgtataaagtaaaaacttcactgctagcgcttctgtccacaagtcactccataaataacctattcctcatgatcactgatgatcagacacttcatagtctgatggtgacaggccactgaggatcttttattcagttcattcaaacagcaagcatgtagttgtgttgcctttatgtctcccactgatacatccaagtgacatttcacaaaaatgcataattggaagagggaaatggccaaagataagagttctgcaaagtaaaataaaaatgataaccctggaagtgaaattctcatataacatagatagaagcacagaagaaatatgcccacagcagtgttggcactggttgtttgaaagactctagatagatagaagaacatagagaagatgtacagcaaattttcctttgcctactcctccttcccaattcccaaaatgaaaaaagtaattgttatttacttatttacttattttttttgagacagagtctcgctctgccacccaggctggagtgaggtggcacagtctcggcttactgcagccaccacctcccaggttcaagcaattctcctgcctcagcctcctgagtagctgggactgtaggtacgtgccaccatgcccagctaattttttttttttttttttttttgtattttagcagagccagggttttaccatgttggccaggctagtcttgaactctcagcctcaagcgatccacccacctcggcctccagaagtgctgggattacagacgtgagccactgcacctggcctaggaaagtaattgttaaaaaaaaaaaaaaaaaaagatgatgtttcaatggaaatgatgctagtcaaaatttcacattaaaggaattctcaaagatattttatgacaacaaaatattggaagttgatctaaccttagaaagtggtatgacaatttgccacagcatagaaaatatgctccctctacattgtaagttatacagtgagcagagggcaaaatttttcaactactcttttatagctggtgttaaatgtattcatgtatatttagccaagaaataaagccttaattctccatgtttttgacgagtttaatctgtccaagacaatagattaatatttggaatcttttcaccaaaagctattcaacagaagcaaatttgatcttgtgttacttccttgatggacaggcaaagtatgaaattaagtattaagtaaaaacagtaaaaatcagacactaaatcaagttgaatataatgacatgaaactaaatatggatgtgcaaataacctatggatttacttgcaatcttccaaaatgattgccttataaatatcaaattttataacttcgtttcaactctctggggaaattctgtttaatcaggcaagtccatctcatgttttcttgttaaagaaattttttttcaaaattttgtgcatatggccacttttatttgaaagtatatagacaaagttagaggccattccaaacagtatttgttttcattacacagttaaaaaaatttctttatttaataaataacttacgaagtttaaatagagaagacatcttgtaagtttgctggaatgctttacctgatgaactttatcaaatgacgagcatctaccattgaaaatcacttagttatctttttcaaatatgctttctattattcttcattagaactgaattgacaaaaacataagagtaattaatgataggtctcttaaggctcacagttttcgatggattattttatgtagcacctactcataaaggcatgcaataactattgattgaataaataaatgttttttactacactgcaaaaattattgattaacaggaaaaaaatgatgatgagccctactggataaagtatgaaagcaaaagcaccctatctcagatgtggcttctacaacaaaccgagaaaataattttggttttctattatgccactttcaattcctggaaaccacaaaaaaaaaatacagtatctttcttctcattgcactactgcaagtgaaacagtacacttactaaagcaacatttgcctctataacagacaagaagatagagtctatggaaggaaaataaatcccagagccccaaactcactaagccaaaaggaaaagtcaagctgggaattgcatcatgaaaacctgccttctgttttgctcctatataagatagctacaaagataagaaagctatacacctccatcacaatttgcccaccaggaaattccttgtgggccccaagttctttaccctaaaacagttctgttgaattttattctgatagtgtaaattgatagctcatcttcacaggtgtgggacaaaggtcagaacaaaaagtcatccctctgctcacctcaaccaaacgcatattatattgaagtatctgccttatgtttatcttatgtaaaaatgcagattcactgagtgcaagacaaatgcgtaagtgactattcctctatctcccctcacatgtaaaatgtgtattcagtgaatgctgatcaaagactcaaaagaatgcaaccgcttgcttcttatctacccacatttttttttctttcttcctttttcccccagtacaaactgttttccctttaaatattgaggtcctcagcccttcttccaaaaaagcacagaacacagatttctcctgtggttctgtgttctttttctgcgtacatccttaaccttggcagactaaccccttgaaatgattgagagttgcctgggtcattttctatgattaataataagtctttcaagcttagtgaagtacatgaataataagtaaaaagagtaaatttagaaaggtagtttgtaaggtcaaatgactacagagactaaaacctaatcagtgagaaatattttgtttcttaaatccttagcaaattaactcccattgttcatagtatgtactctgtatagtgtcagtcagggatacgtaaaccatataatcatatctaagaagaaaatattttgacttagatttgcttatgtaaacttccagcaataatttggatctttgacaaatattgtaatgttagtgatgattaggtataaaggtcattaggtgcccataaacaatgatgtaaaatagatgcaaaaatgttaaaattaccaattgaattttcctacattaacctaagctgcatttttgtttctatcccctttgagattcttaatacgagaagtgaaggaggggaagcatttagttttgttgtgtttggtagaacactagcaccctgcattgtaatgaaatgtcagtcctagagctatttccaccagagaagtggcttcatactcatttataatggcagcagggaacctgactgtggccattgagacagaatataacaacaagatatgccatcctgaaaaaacaagtgttccctacagaatttttaaataaaacatacatttaatttccttcagaaagggcattatttttataaacacagtatcctactctaaaacaatgcagtcattcataaaaagccaaaatgtaggattcacgacatgctgccttattgggttatccttgaaaatgtgcaataggatacttgttagatattgcttctagttagagtttaaataaataaactttgatatcacttctgaaatttcatagcacatttattttcataattttgtagattctaacttcacattcaatggaacgaaactgtttttgaataaaacatctttgaattttctaattcatgttggttttggtctctttgtttcattctcaaaacaacaaatacaaaaagataactgtggtctttgtcaatgttgtaagccttaagagagttcacaaacctcttgtggaagaagtcactgatgacaaagaaaactcactgaaaaataaaacagaaaagctgaaaggatggattaccaaaattttgtttcaaaggatagaaattccccttgctgccagcacaattccttgaactgtttgggaatgatcattgaaagtattttgcatgaaaaaaatgttcgtttgtttgtttgtttgttttcagcaattgtagaccctttccacaaagtgattttttatttttttatttttgagatggagtttcattcttgtcacccaggctggagtgcaatggtacgatctcagcttactgaaatctctgcctcccaggttcaagtgattctcctgcctcagtctcctgagtagctgggattacaggtgcctgccaccacgcctgactaatttttgtacttttagtagatacgtggtttcaccatgttggacaggctggtctcgaactcctgacctcaagtgatctgcccacctcggcctcccaaagtgctggggttacaggtgtgggccactgtgcctagcccacaaagtgatttttaattatagaaggaaaaagaggtttagggttatttttaatataaagaagaataagataaacagcagattctatggcctgtttggcatatctagtatttgtgcaggtcatctgtatagatcagtttccaatgaccttaagtccatcgtacttttgcagtttgctatttaatacaaggaatgttcaaataattttgcaaagaatggaagagttttatttatttacttatttatttatttatttttattatactttaagttttagggtacatgtgtacaacgtgcaggtttgttacatatgtatacatgtgccatgttggtgtgctgcacccattaactcgtcatttaacattagatatatctcctaaggctatccctgccccctccccccaccccgcaacaagccccggtgtgtgatgttccccttcctgtgtccatgtgttctcactgttcaattcccacctatgagtgagaacatgccgtgtttggttttttgtccttgcgatagtttgctgagaatgatggttttcagcttcatccatgtccctataaaggatatgaactcatccttttttatggctgcatagtattccatggtgtatatgtgccacattttcttaatccagtctatcattgttggacatttgggttggttccaagtctttgctattgtgaatagtgggaagagtttattttctccaaaggatcagttctgctggagaatggtgtattgagactagaagacaaccatgtacttcatcaatacgtagaaatcaagagtgttcttactgtacataatgaaagatttacataaatgttaatattagtaaacagtagatgaggaaagtgttttcagtttatagtgtgcttttaaatatactgttaagctttagttcacattctagaattgtttatttttttcttttcctatgtattgtgatcttgtataactctgtagtgtctctctcctcattcatttttggttattctatgcttgagaaaaagttatttatgatatatttcaaaattgtgtcatcattttcacttaactttagcatcaaagttgttcttgtatctttacaaaaatggggttatttgtttacatttacttgaatattgtgaaaatctacaagtttgagttattttgaagaaagtcagtaacaaaagaaaataaaattctcccatttttacaagaaattatgaagtcctgaaaaggccacattgtagttaccaccttttttattatagaacactaaagacattttattctactttttctcaaaagaaaggagataaataattattttataaaattactcatacatccaggaagcttttgaagtgaggtcctttttaccaacttggctaaagtgagtaagtgtgaacagttattctgttacatttaggcagttaattatatttgaaaaacacataaagaattgaaaatagaacacatgcactgagatggttgtacctccaacagttgaagagatgttctgttttccttcacatgctgtgagatgttgggagtacaaccacctcagagcatgtgaaaaaaatcagaacatctcttaagctgtttaaatattataataatggccttttctattgacagataaacctacagatttatattacatgattgctttgttcatagctataactacaaatgcatcacgaagaatttccaaggaatctccctaactttatgaaagaatgactttagataatgaaattgtcctacatgtatcttttaaatataaaatgtaaaacaactctttttgaaaagtagttatatcatctgttaagatgttttagaatgtaaaacatagtacacataaacacattctaaatgattattcacgtggtagagttcctattagaaaacatagagcataattattatacacacatacatacatacagttaaacaaaattatgggaagtcattgttctggactaagctcccgccctagggttcaacataccagaccaaaccaaaatgaaattacttacgctaaatgccacataatcaaactgaaactttaagaaagcaaatagatccccaaacaaagcaggttttcccgaatacaggagattccaatctacctgagtcaggtttacggaatttccctctgctttaatcctcataaaaaagaaacctgatataacctgatgttaaccagttaggtggtttttgttgttgttgtttgttttttccttattgttctgtttcactgtccccaccaaaaatatacctactcttctgccattgcacagagggaaggctcatactattttgtataatggaggctgtcctgattcaagaatcaagaataaaagccaatttgatctaaaactacatttgtagttttgtgttttgacggtaatacatacatatataaacacacacactcacacatacatatacacaaggctatttatgttttaagaaaaaatgaatgataatatggcaaataatttcattatagaaaatatttaacttactcatatcatttatttattcttttataaagcaaatgtaaatctggaggatagtatatgtcataccaagcaagctattagaaactgtgttcacatgtcaatgattacacatctgcctttgtaaggactttttcatgtactgcattggaatgtaattcaaaccactaacattcttttatctcatgttgggaggattacaaatacaacttttggatattatatttttatccctccataaatgttatatcatatttgtgtgtatgtctaaatcttattcaaaggggttctacttttagcataaaggttctataaggtgcaattgcaacatatggtaatttgatgtgtataatttgaagtgttgccctgcatcacatggatgtgtatgatttacttgagtactaaagacagttgtaaatgaaatggtaatgtgtccattttaaagtacatatttttttcattgcttcttccactgtgtgtgttttgaaattatatcagaaataacataaaccattttttaaatatccaatggcattttaaaactgaaaaagttgtctacagttacttaagacttttttggtttttgcttaatagctccacactaaaatttaatcatataattctctataattatgtgtaaatttctaaacactgtgtgggtttttctataagagtatattaaaattcttactctgaatgcaacctaagcattgtgtgtcatgaatttctagtgctatagcatttgcatttgagcaatgaaaataatcaacttaatttgctctcctagagagcatggaagtgggtttgattagtctattgaaagtttgtgttttcccccttgaattggatgcagggggtagaattgccagcatgatgcaagccagtagggatccagggtgtcaaggcaatgctaaagttgactatattaaagacaaaggagaaggtcgactagaagcagacaagttgtttatgctggagctgtctctgtgttttttggaaataatttatccatgcaattgtattatcatgatttttatatatatatatatatatttacctcattgtttttaatggatatttttgcaaaggaccacccaaaaacattagaataaacggtgcccaatgcttaaacagggctgtacctttcttatcagccaggctagaaaatctcataattcatgggacattgggtagactgcttaacaagttttatctaagtattagggaataatgagtcctagaatgaggactgcacttaatctacctaaaaacattcagaacaataccagtaaggatccaactgtttcaaaattacttagttaaatcctcccatgaagctcagaagttcttaatatttgcaaaaatagccagcacctattaaggtaaaattcaaattgttttctaagattattagtatgcaaagaatcaggaaaacataagacataatgagaatattcaatcaatggaaataatcccataatggccacaaatgctacaatttgcaaagacattaaaatggttattataactacactccgtatgttcaaaatgtgtacataaacatatgtatttatatacatatgtatcatttgagtatatgcaaacacattatatttacatatacaacatacacacagatggatatagaacaaattatagatgtttgtataaatgttttatttcatagacatgcatccctatttctggaaggaaaaaatggcttccctctgccctcctaggttctttaggctgtgaattaagttgacataaggcagattaaaaggagtgaagctacatttagttgtgtatgtatacatgggagtcccaaaaaagtatgagattcaaagaatggtcagattaataaggattataaagcttcattagctacagaaagaaagaagggtttgatgaagcttttgggggtgattttggagtcaagcactataaaagggtagggggaggaaatgtatggtgaataagattgcattatattctgataagagtctctcaggtaataaaagttgcctctgagccgttttcctcctggtatagtcagtttttgtacatacaaactttctttacaaaagggcagcttttccgaactacccatgtgttcgcagtttctcaaaataactagctaataatcaatttgcaaagaagagtattttgggatagtgtcctgaaccccaacacttctactgagtcagtctagcaacagtgataacccaaaaacaatgaacacacccaaataatataacttgtttctaaataccattcatggtaaaagtaacaaggactataattttaaggcttggacagggtatatatgagtctagataatcttatactaccagaaagaagagaagtgaccacaaaataaaaagaaagagagcatgtcaaagggatagggggtaaaactgaaagagctcccaatggtgagacattggaacaatttgtactacattattaatagtattgcatctgtaggggtggaggggaagcttcctctcctttcatcagagtttcactaaaatgactgtcaatagacagattattagaagaaaaaggcacacagatttattaacatgcatatggacaagggaatcccacaaatacgatactcaaagaaggggcagatggtagaggcttaaatattttttccaccggagagaggaaagtgggcagctgtatgtaattttagagcagtagtaaattatttttaggggaaatgaatgaactcaaacattcctgggacaaagttcctctgagctctggggaaggtggtgggagggtgaggagtggaacttcactgtgaacaaaggttgtcttcttatacagataaagccccccaaaagaaatgtatgaccatcattagtagtatctaatctgctctcctcatatgtttgtgagaaccaaataatattttaaaacactagaaaatataaaatgttattatgatttttgatactaaatttttttaaccttgattgtattctcaatttttatttatttattttccaacttttattttagattcagggtgtacatgtgcaggtttgttacatgagtaaattgcatgtcactggagtttggtacacaaagtgatttcatcacgcaggtactgagcatggtacccaataggtagttttttgaccctcaccttcctcccaccctccactttcaagtaatccccattatctatcattcccctccttgagtccacgtgtacttgatgtttggccctcacttacaagtgagataatctggtatttggttttctgttcctgtgttaatttgtctaggataatggcttccagctccatccatattgctgcaaatgacatgatttcactctttttatgactgcatagtttcaagctgtatatgtactgcattttctttacctagtccactgtcgataggcacctaggttgattctatgtcttcgctattttgaatagtgctgcaataaacatacaagtgcatgtgtagttttggtagaaataatgatttatattttggaggatacatatccactgatgggattgctgggtcaggtggtagttctaagttctatgagaaacctccaaactgcattacagagtggctgaactttacatttctacgagcggtgtataattgttcccttttctctacatctgtttttttttttaactttaatatgttgtattattggcaagggggttgcttttattacatctgttggtttgtaaggcagaatgtgaagtccacggacaacccaattgcaaggtaataagctcatccactgagaaactacagggccaggtttggtataagattgatgctatagttgggaagtttgttcctctaaacatcatgttgaaatttgatccttgatgtacaaggtagggcctaatggggagttttcaagtcacttggtcaggtgtctcatgaatggcttggtgccatgctcacagaaatgagttatgagtgagtaagatgctgcatgcacaaggccaatccttgtggaaatcactgctatgaagaaaaaatataaggtaatgaataaaataaacagtactcaagagaataacttatgcatctttaatgtgtttcgtgtgtgtgtgtgtgtgtgtgtgtctgtgtatgtgtatgtgagacttgttttccttctcttctatatgatatataaattaactacttgaagaaaaaaatgctgctctattttattagcatattcaaaaggctaccagaatagtcacttttgtaaactgcagtctagcttttaaaagggagagataaaattatgatgactccaacagttatgctaggtgttaagacaaagaaattttcacaatgatgttaacagaaatgcattccggaattagaacctgccattttatgccaatatgagcatttgcaaaataaaatattttagtatttgattacttgcagcttaattttatagttcatgataatgcaggatgctccttagttcagctaaaatccagattcttgttacacaaccaggacagattagacacgtggacacattgaaatgtgaggagagcagaattcactgaaagaaagctcggctgggcgcggtggctcacgcctgtaatcctagcactttgggagggcaaggtgggcagatctcctgaggtcgggagttcgagaccagcctggccaacatggtgaaaccctgtctctactaaaaatacaaaaattagttggtcatggtggcgcatgcctataatcccagctactcgggaggctgaggcaggagaattacttgaacatgggaggcagaggttgcagtgaggcgagatagcgccattgcactccagcctggctgggtgacacagcaaagactccatctcaaaaaaaaaaaaaaaagaaaagaaaaagaaaaaaagaaagaaagctctcagcaaaagagagggttcctgccaacaggcccccacctcacagattgaatagcaggccaccgcacatgggctgaagaccaggttcctccctgctgcatcatgcaagaattcccagtggttccacccaattcttctagtttgcaggtgggcccttagtctgagccactccacactgatttatttcccttactgcacatgtgttaagggacagaatttttcaccatgggcatgtataggcaagccctctgtgcagaatcacctgggtggcatttggttgtctcctatctctatcaatgatactgaggcaaatatagtataacacaggtggcatgttgtaaaacagagtaattcgaaattggaaattaacttattatcaaaaaaataatttcttctctcagtggaataatttagtcaacttccttatgacagcaatttgtgacaactgaggttagacaaagttggaacctaaatttactgtaagtaaaggttgccattatgctttatatgctgaaaaggcattgaagaaacccatatttgtcaacttttgaggcaacatgtacacattacatacattgtgtgcttagtacatgcatgtgcttatgtgctaagaagaaccctacgtgagcaaacaatgatcttttcctaaaaaagagttcctgaccactaagcaaaaattcatgcaggtatgctcacaaagaaaaaaaaaatagatgtaaaaatgacacaatttattacaggtattaattcgaatggtcagtaggagaagcaacaaggaagtaataactggtagcactctagagcccacaggcaaatgctggaattctctagcacagataatcctgtaatcatgtaataatttgatcttttgagataatgaactcactcctgaaataactgtatcaatccattgatgagggctgagcacttatgatctaatcacctcttaggtgtcctattaatgccatcacattggggataaagtttcaacacaagttttgaaggagaaattcaaactgtagcactgaataagccgaaagagtgtcagttttaaataattaaaatgcttacctcaagtcattgcacataatgaatcacttttttgtgcctgatctgaattattttctcactgcttttagcagtaaggacaagataaaccaaaaattggagatcgactatgtgtgttgaagagcttcattgactgaatttagagtctcccaagttcttgaaagtgaaaggtatggcttggaatgggaaagagggatacctacaccattgatttggacatatctccaaggttatagaaagtttgaataccaggagttagtaaactaatgtccatggccagataggtccacagcctctttttgtgtagccattgagctaagaattgtacattttttttaatgaattgtgcaaaagaaaacagaataatttgcctaacatactatttttacttttgcagaaaaagtttgccaatccctgacctaatgcccctagaaaaacatcttcctttcaattttctttgccagagtaaggaaaaaatccccctctttcactcatatctatgtgccaacgctgtaatcagatactaatcagtatcagcatttcttgtggggtagaatgaaaacaaccttagtgagtaagacaagatgtatttccagaaagaattgctggattttgttgatttatattgtcagaattgtcggaaatacttcctggagttcatgccaaggaagaaaatgttgaactgtggattcagatattttttaaatatctatgtgggtttgtaaaatgtaatgtgtgtctgtatttggtgtactagttggtgcagggagccaaaattccaaaaatttgcagtttgacaagattcataatggtacttcaaaccaggaaagtaagttgaagatactgcaaatgaaatgtactctctcatctcagcaggaatgggagggaatttgcagagccaatgtggtaaccattaagtaacttctagcttctggaataaagaatcttaaattccacaatagtctgtgttaaggtgacttctctgttaggtccccagggaggaagtagcagagggcaagggtcctacttagtgtttctatcagttagaggaaacaattcaagctttcaaagcaccacatttgcatttaactccatcaagtcacagaagtgataataccagtagcctgaattgtagtctcctagacttggtgcattagtattaggtatactagctgagtcagtgtggattaaaataatttaatttactcatactttgttgcaaccacattgtcaaaggcatatgtatttttttctgacgtatttccaagcacttaggtttagtatattctttttaatttatgaccccaggccatgcactagtgacatatttttatccattaaacaaagacttactaacctctttcagagacatcagttcagtagggaattcaatatataatggtgttcacttgaacctttattactctacttcagttgcatgtagttcttttaaaaaaatatggtcattaacatggaagtggaataaaacagaagcccaaagctttaaatttggatgtcctcagtcaagaataaaaatgtatgtctgtatgcatgcctattattttaaatgtgtattaaacagtctattaagcaatatggattctgtcctccctccactttcacaagtttatttttaaaatgacagagatggtcagatttaaacttagatttcatgtatttttttttgttctaggccagaacaaggcattgtggaacaaaccagtcctgtgttccatcaacctttttcagtttgctctccttttcctacaatgggtcttgtgtgggcatatgtatacatctcagtctgcttgtcaaaaatccatctaagtgtctgtcccttggccaccatttggactcctgatgtggacactggtgtattctgatgtggacactggtgtattctgatgtgaaggagagaaaaagaaaatatgtttgcacagataatggaaatagttatggtgttattggggaagagaattccatgatctcataattgcgtatgccaaaaggaaaggctggaattgcataggcaatgtacatcttattattagccatttttgcttctgtttttaggctctctacattgtgagaaagagccaaggggccactcttctaatagaattaaagtctaacggcagtgtatgctcagaagctggtgtagcagctaggagaaagtctcactttagtcttaaccagactatctgttccattgtacggtcatatggccacagcaatataaacaaatggcagtgtccttgccaactgcttttatataattttaaatacatgtagcatatatatatatatttagtatatatgtttactatactaaacatatatcaaggttaacaaaggtataacaacttacacagcgattcccaggcttacaggctttacaactatacacagcaaagaatttttatatacctattaattaacataaaattattcccaattcatccactaatacatttccttttaatccgtgtgctgcaatatctgagtggatgaagaacaaatggtcacagtattgaatatttaattaattaatggtctctttattctgttcagttccaacagcctggaatttgtattatcagtggagttgcatgtaaagagaacataattagtactgattcatatcacttgtaatgccctaaaagagctgcacactagttagacactctcatttagattcctagagctgcctttatgtctacttccctagttgtggttgggaagcttttccttaaattatactatttcaaaattaagtaatcaacatcatcatcatcataatcatcaacgttgttgctttcattattcagaatttgtctcagcagcctgtgtaatatttactcgtagccttggctgggtaaagaatttgattcaaagaattcattggttcaatttttattattattattattattatactttaagttctagggtacatgtgcacaacgtgcaggtttgttacatatgtatacacgtgccatgttggtgtgctgcacccattaactcatcacttacattaggaatatctcctaatgttacccctcccccttctccccaccccatgacaggccccattgtgtgatgttccccttcctgtgtctaagtgttttcattgttcaattcttacctatgagtgagaacatgcggtgtttggttttctgtccctgtgatagtttgctgagaatgatggtttccagcttcatccatgtccctacaaaggacatgaactcatccttttttatggcggaatagtattccatagtgtatgtgtgccacattttcctaatccagtctgtcattgatggacatttgggttggttccaagtctgctattgtgaatagtgccccaataaacatacgtgtgcatgtgcctttacagaagcattatttataaacctttcgatacatacccagtaatgggatggctgggtcaaatggtatttctagttctagatccttgaggaattgccacactgtcttccacaatggttgaactagcttacagacccaccacagtgtaaaagtgttcctatttctccacatcctctccagcacctgttgtttcctgactttttaatggttgccattctaactggtgtgagatggtatctcattgtggttttgatttgcatttctctgatggccagtgatgacgagcattttttcatgtgtctattggctgcataaatgtcttcttttgagaagtgtctgttcatatcctttgcccactttttgatggggttgtttgatttttttcttgtaaatttctttaagttctttgtagattctagatattagccctttgtcagatgagtagattgcaaaaattttctcccattctgtaggttgcctgttcactctgatggtagtttcttttgctgtgcagaagctctttagtttaattagatcccatttgtcaattttggcttttgttgccattgcttttggtgttttagtcatgaagtccttgcccatgcctatgccctgaatggtattgcctaggttttcttctacggtttttatggttttaggtctaacatttaagtctttaatccatcttgaattaatttttataagatgtaaggaagggatccagttgcagctttctacatatggctagccagttttcccagcaccatttattaaatagggaatcctttccccatttcttgtttttatcaggtttgccaaagatcagatggttgtagacgtgtggtattatttctgagggatctgttctgttccgttggtctatacctctgttttggtaccagtaccatgctgttttggttactgtaaccttgtggtatagtttgaagtcaggtagcgtgatgcctccagctttgttcttttggcttaggattgtcttggcaatgcgggctctttttattagaacatgcattcaattgttcactaaaatctcattttctcataataagttcttatactgaagagtaatttaacaaattcaacaccttcataaaaactttcagcaactagagatagaagagaaattcctcaccctgataatgggaaacctatatacaacccacaccctcctagtcttgaaagactgaacacttactaccactttaattcactactatgtgggagatcctgcatacatgcatatagattggaaaataagtaaaacatattttttttacaaacattattgtgtatgtagaaaaggctaagtaattgatgcaacaatctagtaacagttaaaatttaagtttgcaagatacaaaattaccatacaaataacaattgtatgcccatgagctagtaattaaaatgaaaatactttctaaatataaaattttaataccataaaatatgaataactacaaataaattttacacagtatatgtaataactgtacactgaaaaccataacatttccctggggaaacttaaaaagaatacaaattagagtagagatatgctttctaggttagaagcatactgttgttaaaatttcaattgtgtaaatttcatctatgaatgcaaagcaatttcaatcaaaatcctaggagacgtttcttttttagttgaaatggacaactataaaatttatgtgaaaatgcaaagggccaaagcagacaaagtatttttgaaaaataaagttgctggaggatttatactacctggctttaatagttaatacaaaattcatttcaagagttaatgaagacaggtgggcttaaactattctaaagtatattttactttatatattttttgaataaagtcagatactctcactcagtttttaaattaactcaacagataattttctatctctaccactaccctgaaacttcactaaaattagaaccaagtttcccttcataagtaagatctgtatcttcatagacacttgtacagagttgatttggccaattgttttttaataaagataccaagataattcaaagagagaaggataggttttccaaaatatcatgctgaaagaactgattaaccaaatggaatatatataaatacgtgtgtgtgtgtgtgtgtctgtctgtgtgtataaattataaaccttatacaaaacattttttaaaaaagtagcttacgtgtaagttaaatataatagctgattctaaaacattactgaaagaaaacataggaaaaagttcttataaccttaggtaggacaaaaaggcattaataactaaaaataaataaacaaataaaaaagaatattgatgctgtttacatgccaaatcttggaattctcgacttcagccataaccatctctctgcttagattcattccctgctatattaaatccctggagcttgcgtaacaaattaccacaggccaggtgactgaaagcagcagggatttgttctctcacagttttgcagggcaaaatttagaaatcaagtgttgctaggtccatgcttcctttgaaggctttagggaagcatccttccaagcttcctagcttctggtggcttctagcaatcatcggtatcccttggtctgtagctgaataactccaatctctgtctctcttatcatatgaccttctttcctatgcatatctctgtgtctcttcttccctttttattaagtacactaagtattgattttaggacccaccctaatctagtgtgacatcatcttaactaattacatctgcaaaggccgtatttccacataaggtcacattgtgaggtcctgggtagacatgaatttttgagggacaccatgcaattcaatactcttacctaggatgttttctttactcccttacatatgtttcctttcctaaggatattccattaacaaatgatgtctcacgctatgcttttaatgaatttgtccctaagacaatgttatatccctggaaactaccaaagtgtttggcacataatggatacataactaagtatcccttatctgcaaggaatatgttccaagacccccagtgaattcctgaaatggcgaatagcatcaaactatgtaaatactcttttgcgatgtggtaatcaagttggctactaagtgactaaagggtaggtagtgtctacagcataatatgctagacaatgggatgattcagatcctgggaaagacatagtgatatggcatgggatttcttcatgctactcagaaaggctacaatttaaaatgtgtattttttatttctggaattttccatttaatatttttagaccgcatttgactgcagttaactgtaaccatgaaaagaggaaccactaagggaggatgactatatgtgtgtgtgtgtgtgtgtgtgtgtctgcacgcgcatgaatgataaaaagtggaacctatcaggaatttgggaaatatgtgtgaacaggatccagtaaatatgagaagaaagtgcataggtgatagttttgattggggcataatcttggcaacaatttctggaggcaaatttggcctatgaaacactgaaagctatttattaagtacctgctattaaagcaagatatgttagtagaacaatactgacaaatatttctgcccttaggaaggttacattttagtgaaaaagcatatgaaatatttacattctctaaaagtgagtatgttataagtgctatgaaaaaatgctcaagaaaaagatgtctggaggataacgtatggtgggataaattgtgttatgtttagagcatagtacagtgttactcagattgccagatgacagcgattgcctattcaaatcagaggtggacaaacttgcaggggctcaagtgcctgaaaaaatggcaaattcacaaggcctgacaagatggcaaggcaattacaggttgtattgtacagaaaacagtaatctaccagtgactttaaaactcacacttgagagctgctctgatgatcagttttaaagtgtcaacttgaccgggaaatgggttgcccagatatttgcttaaacattacttctgaatgtgtctgtgaggatgtttctgggtgagattaacatttaaatcagtagactgagtagattgtcctcctccatgtggatgggcctcatctaatctgttgaagacgtggatagaataaaaggctgagtaagaaagaattatttctctctgccttactgtttcaaactgggacatcagtcttctgtcttcgggcttggattcagactgcaactataccatgaactctcctgagtctccagcttgccaactgtagacaatgaactttccacttaattcataagccgattcctaataataaatctgtatctatgtctatatctatatgtatgtatgtctgtctgtctatatatctatctatctatctatctatctatctatcgatctatctatctacctatccaattggttctgtttctctgaagaaaccaactataatgactttgttggagatttggagatctgtatttctaacatggcatcccatccaaattaaattgttattaaatttctcctggttatattttttacccatgagggaaattacatattacttacaatagagatgaaaacagaaagagcataaaacaagtgaagcctgtcaaatggagggaaaagacactgacatggtcggttatcaccaagttacattatcaactccatgtaaaactcttataggtttcactacttcccaagtcaataaagactccaaaagtaaaagaaggtcatttgataaaacaagaaaataaacctatcttaattgttcataatgattttgttttgcattttaaccattttttttttattatcctcacaaataataacactaagtcaagtcatgagtcaaatactaatctttaggccaagacaaaacaaccaactatatgcctcttcaaattatttaaaaaatgataaaattaaggaatttgaaatattatctatatgtgtagaatctgtgagagaaacaaaataatttcctacttcagccattgtatatatactagctttgtttgaattgtcatcttactaaatggacatgtgtaatctttctctaaaactaattcctgccataataacaaaaaccaatattttagtagaaatggggttttgccatgttggccaggctggcctcgaactcctgacctcaggcgatccacctgccttggcctcccaaagtgctgggattacaggcgtgagtcactgcaccaggccaattttaataataatttattgcacatttttaacaggttcattcattttcacaaaagtcctcaggctaatagctgttccttcatgtcaaaatgtctctggctaagaccagaaaagaaaaacagtgggcaatttccttttcacctcattttatctatgcaactctataccattttcattttaggagactatagaagtgtggagtctattttcaggtatatctataattaccaattttattctaatatatcagcaaaattctttcacatgaccacatgagtcaggaatctggggactatgttaatcacattataaaacagaaacactctgaaaggtcagttccttcttgcctaatccgatattcagagcctgttcctgagtcacggtaggacaggaaaaaaaacaactgatgtaaagtttcctgaagtgtttaatcaacacaatccagactaaagcctgaaaaaacatttactgtcaatgtccattagcctaggagagttttctgagctcatagaagaaaagaggctgttttccttcaccaaacaagagggcaccttgctcattcattctgggtccttaagaaaaaaaagtggatgaattttgtatgtttaaaacaggcaaggaaaaaaagaaagcaaaaatatatttacagtagactttccgtatccaccaaccacagctggaaaatattcaggaaaaaataaaaataaaaaaacgtaacaataaaagccaatacaaataaaaaatacaatataacaactatttccatggcatttacatttcattagttattgtaggtaatctgcagaggatttaaagtataaaggtggccgggtgcagtggctcacgcctgtaatcccagcactttgggaggccaaggtgggcggatcaggagctcaggagatcgagaccatcctggctaacacagtgaaaccccttctctactgaaaacgcaaaaaattagccgggcgtggtggcaggcacctgtagtcccagctactcgggaggctgaggcaggagaatcgcttgaacccgggaggcggaggttgcagcgagctgagatcgcgccactgcactccagcctgggcgacagaacaagactccccctcgaaaaaaaaagtataaaggaggatgtgtgtagcttatatgtgaacactatgccattttatataagcgacttgagtgcccacagattttggtgtctgcaggggccctggaaccaatctcctgcagatattgagggatgactgtctactttccagacgaatttaaaatctttggtccaaataacagcagaataaataaatcctatgctgttagctactattgttttggttaaatggcaggcatttagagttgaaaaaatagttagcttactagagggcaggaagagacaaactagccttgacaattctgtaaaaatgttgtcaaacggagcaagtggctggtattcagaggtgactgagtatacttttcactgtggttgcattctcattgatgacaaaccgaacatcaaaaataagggttggatgggctttgatatcacgttaattaaacattaggatgacatgattcaaatcagttatttaaatctatattagaataacttagtgatccagagtactttttataaaactaaaccaaatgtaatgtagttcatatataatatgctttttgtactagcatgaataggtagatgtacttatatatgtgtgtctatgtgtgtgtgaatacacacatatggacattaaaggcaaatgttcatcattaagttgttgaaagaggacataaaagaatattatgtatgttgcatgtatgtaacatacataacataatacaggctgagcctgtcagaacattttagtaaataaggcaacacgtatctgatggtggtaccataaaattacaatggagctgaaaaattcctatcacctagtgacagtgtaaccatcatgctgtcctcaaataatgcattactcacgtttgtggtgatgctgatgtaaaaaaaacctaggatacttccagtcgtataaacttgtagcaatacaattatgtacaatacataatgataataaatgactatgttgctgatttatatatttaaatatttactatattttctatctttgtattacagtatactccttctacttattaaaaaaagttgaccataaaataactcaggcatgtccttgaggaggtgcttcagaagaaagtattattatcagaggatgacatttccatgcctgttattgcccctgaagatcttgcagtgggacaagatgtgaaagtggaggccgagtgcagtgactcatgcctgtcatgagtctgaccatgactcatgggaggccaaggtgggcagatcacctgaggtcaggagttcgagaccaacctggacaacaaggtgaaaccccgtctctactaaaaatacaaaaaaaaaaaaaaagaaaaagaaaaacttagccaggagtggtggggagcacctgtaatctcagccactcaggaggttgaagcaggagaattgcctgaacctgggaggcggaggttgcagtgagccaagatcacaccattgcactccagcctgggtgacaagagcgagacttcgtgtcaaaaaaaaaaaaaaaaaaagaaaaaaagaaagtggaatacagtgatattgattatcctcaccgtgtacaggcctaggctgatgtatgtgtttgtgtcttagtttttaactgaaaattctaaaaagtaaagaaaaacagaaaaaaatgtagaataaagatataaataaaatattttttgtgcagctgtgcaatgtgtttaatttttaagctaagtattattacaaaaatcaaaaagctaaataaattaaaacttttataaagtaaaaagttacagtaagctaaggttaatgtcttattgaagaaagaaaattttttataatttagtgtagcctaaatgtactgtatttataaagtttatagtagtatatagtaatgtctaaggccttcccattcactcaccactcactcactgattcacccaaagtaacttccagtcctgcaagcttcattcatggtaagtgccctatacagggtaccattttttcatcttttatgctgtatttttactgtaccttcccttttttcttttcttttttttcttttctttcttttttttttttttttttttttttttaacacagtctcgctctgtcacccaggctggagtgcagtggcacaatctcggctcactgcaacctccacctcccaggttcaagcaattatcctgcctcagcctcctgagtagctgggattacaggtgtgcgccaccatgcccagctaatttttgtatttttagtaaagacagggtttcactatgttggtcaggctggtctctatctcctgacctcatgatccacctgcctcggcctcccaaagtgctggaattacaggtgtgagccaccatacccagccttactgtatcatagatagatagatagatagatagatgatagatagatagatagatagatagatagatagataggaatatagttgcctacaatattcagcacagtaacatgctatataggtctgtagcttgggagcaataggctgtaatatcatattgtctaggtgtgtagaaggctataccttctaagcttgtgtaagtatactctgtgatgttcacaaaattgcaaaatcccctaaggatggatttctcaagacatatcatcatcattaagcaatgcctaactgtgctttactttttgtttcccacttgtaacattgtttttctttttgtaagatataaactattatgattctttgtggatgaatgcacattaatcatcaccaatataaaaaataccatcaagatcaaagttagaagtggcactatatgtaaaaattgtgtgtctctaattttataaaaagtttaaaatgatcactaggtgattccagacacataaggcctcaatggcagaaaccatatgaaaattacaaagttaatatttaaagacccggcatggtggctcatgcctgtaatcccagcactttgggaggtcaaagtgggaggattgtttgaacccaggaattcaggacgagcctgggtaacatgacagaaaaccatctttacaaaaaatacaaacattaccctggcttggtggcatgcacctgtagtcccagatacttgggaggctgagatgggacgaccccttgagcccaagagattgaggtggcagtgagtcaagagtcatgaggtggcagtgagtcatgtagggcactgccctacagcctgggtgaaggagtgagaccctttctcgaaacaacaataacaaaacacaccagtaataattttactaatatatttgatttgtaaggcaaataaatataaactttaggagtcccaccattaagcggacagtattgtaatgaaatctcagcatttggctcagatggaactcctttatatctaccaggaacatcacggcagcatttgcacaatgggctatagaacgatggagtggcataattgctgcctcactgaagcgtgaatgcagcctaattaacaggattgaaactgctacactcaaaatctcattgcatttatcttcttttgcttactttctataggtagggtggtcaccgaagtgttgcttctcattgacatgctgcagtgtttttagtccacctgcttcatcttgacctctgtcttaggatgccatgtaagcaactctctttttgctcgagtattctaattaaatcttattgtctaattgagatagtggtatacagagcaattgaaaatgttctatcccaagagaaaaccaaacaccacatgttctcactcataagtgggagttgaacaatgagaacacatggacacagggagctgaacatgacacaccagggcctgtcgggcagtggggggctaggggagggagagcattaggagaaatacctaatgtagatgacgggttgatgggtaaagcaaaccaccatggcacgtgtatacctatgtaacaaacctgcacattctgcacgtgtatcccagaacttaaagtataataaaaaaaaaagaacaaaaaaaaaaaagaaaaaatgttccaacccttctgctctaaagggtagatagaagcaattatgaaaatccatctgccaattgcctttaagatagtgtttcctgccaatacactttcattcacttcaataaatccctggctgaattctttgataccattttttaatagaaaaaataaaattataacaagaaaaaataaatggagatgaagataaattaaactttccttccttgatggtgatcattctttaaaaaaaaaaaatcagttaatttgttttcttcaggttaccagtccaattttgcttatttctttcactctcttcgtaaaggaccaagccactgctttgttgtatgaaaataatattttaagacattataacaagattatttgtttggctttgtgaaggggcatgtaatggaacaccagaaatcctaaactgtaatttaggatgtcattaaaagcttgactagggcaggatatttatatttctaggccttcttattttttgaaaattatgagaaggcatgaataaatgacttttagaaactcattaactttaatatttctgtggtttcatttatatttgctccttggccagctgcaataatacaagtaggtccatgctgaaatcaaaacatatttctttagatctgtaattaaagttatgataaagatcctctgacatatatatatatatatatatattttttttttttctgtgtcaccaatttgtattcatatctgtccttgagacttaatgagcttcacagtgctggcattccagatgttgcctgtggtaaaatgtgacaattacaaaaaaggccttcttgctccacagtattacctttaaatcccacgacaagtgaaattaaacccttatatactttttttcctgtttgcaaaggtttggggataatatgttttatacatgacaaaaatataaatattttatatgtccgttaatctttgggtaagggtagatacaatttatttctatcaccctgttttgacttttgaaaccaaacaagttaattttaacacctcttcagcatttacaccaatgatccctcttgtctctcagctgcctcactgcttcaatactgtcacactgtggctgcttacttaatgtataggaaagacatacagatatttaagcaatttagaactgtttgattgaattaaaaaaaatgacactgtggcaaacctaagctgatttgaaacttcattctcaggtgtgaagatgaacaatttaaaattgctgaactttttatttggtcatttaccaaactggtaataatgcctgcttcaaaatgttgctataattaagcaacatattatttgaggtatatgcaataaaaataaataaaattcacttaaattttataaaatattttgttttataaattataaatgccagtaatagttcagtgtgctatacttcctgaatgtatctatttattattagttattaacacagtgatctaatagaacgaagcagcagcaaccactgtcttcagtccaaagtctcgattaagtatttcctgattctctaaattcccactgccattgactagtatctggttgtccttatctcatgctatgactattttaatagataatcatccctatccattcttctctatttgtttttcactcttctacttttaactgaaaaattaaattactggagatcatggacttgctaatcactgaaggacaaagggagttcctgaaatgtctctgagaactcattctaattccattttctgttactgccatggttcatgctttagatgatctatttgtactgaatttccagtttctcaaacacaagattctgttacaagtatctgggtttaaatttcatgttcttttttgtcatcctaataaaatacaacccactcttacagtccctacagacccggattaaacatggttttccaactttctcagtatggatttgtcacaccaatctttttgcattcatgacatttgtgataatacagtgtaattacttgtcattgtgtctgatttccccaccaggagctaataataccataatttcagtacagagaaagtggtcaagaagagaggaaggaggggaagaaggcacagagggagagagaaagtgagtgagacacagagaaagaaagagaaaacactaaggtgcttattgaaagtaaattacattattacattgtaagcaataatttataagcttaaatgatactaattagaataatatttcacattacagctaacatttgctaactgaacccagtcatacacataaactaaactttctactttgcatattatgacaacatatctctcattaatttgatactctgtaatgttatattcctaattagtcatatagaatatatactttacctcgttacgtcccagctcatgtttaaaaaatagcctcatgttatcatttcattgggaagagagatatttgaaatcataagtagttggaattattctattattctattctattccatttactccatttccattccactccaatccattctattctatgtgcctttagtttagatttcaagggcttatgagaaggtcagaaaagtatgtaccagagggtggtatatttgagttgaaagaaatcctaaaggagtgggaggtaggtattgaaaataagcttcgtggatttgtcctggtctgaccaaagaatatcaaatagagatagtcaagtaatttcagggtgctaagacttttctacagtctttgtgtagaaaaatgcaaatacatgtctgttgatcagaaaaagaagatgtgaataaatcaaagtcatgtcactttaataggaaaaattttaacatcttcagctctacatgcagaaaaaaacatcattattagtaagactcagagagaaaatggaagaaaggaaggttgagaatatatgtgtggataattttattttaattaaaagtcatacacaggtcccttttatgtacaggatatattaccgttttcttgtctgtgacatttgtgttaaatgacatgggtgagtggtaacaactatggagggtgtttaagtctctgaataaagttgacattaaattccactggctactagatatgactgcaaagtaagaagacagcatttcatgtctagtttgtgaaattcatatcattgtatttcagtattaaagtttatataatgacacacatctgtgttttatctttcacacttccactgttgttatattttattccctcttaaaataacaacactgttactaagtaccattttttttttttagacggaatctcgctctgtctcccaggctggagtgcagtggcccgatctcggctcactgcaacctctgcctcctaggttcaagaggttctcctccctcagcctcccgagtagctgggattacaggcttgcatcaccacacccagctaatttttgtatttttaatagagacggggtttcaccatattggccaggctggtcttgaatgcctgacctcgtgatccacccgcctcagcctcctaaagtgctaggattacaggcatgagccaccgcacctggccgtccgtagaacacttacaaaatcaacatggatatgcattgggtcaaaaagtcaatgatttccttttttaaaaaagagccatctcacaccagttagaatggcaatcattaaaaagtcaggaaacagcaggtgctggagaggatgtggagaaataggaacacttttacactgctggtgggactgtaaactagttcaactattgtggaagtcagtgtggtgattcctcagggatctagaactagaaataccatttgacccagccatcccattactgggtatatatccaaaggactgtaaatcatgctgctataaagacacatgcacacgtatgtttattggggcactattcacaatagcaaagacttggaaccaacccaaatgcccaacaatgatagactggattaagaaaacgtggcacatatacaccatagaatactatgcagccataaaaaatgatgagttcatgtcctttgtagggacatggatgaaattggaaatcatcattctcagtaaactatcacaaggacaaaaaaccaaacaccgcaagttctcactcatagatgggaattgaacaatgagaacacgtggacacaggaaggggaacatcacactctggggactgttgtggggtcaggggaagggggagggatagcattaggagatatacctaatgctaaatgtcgagttaatgggtgcagcacaccagcatggcacatgtatacatatgtaattaacctgcacattgtgcacatgtaccctaaaacttaaagtataataataaaaaaaagggtgcttaaaggatatagtgtctcattgagtaatcaaattaggaataagcaatatttatgtgttcaaaaacccaaagatgattggaaaaaagcaatacttaaaaaaaacccttgaatcatatatttgattactaaattggctattactgtctacaaaattaaagaaagagaacactttacactaacctttataggggactacaaaagttgtatttccatgaaaatttaatattcatgatagacatacgttatagcatttctaagtcataaaaggctattgaagggatgtctttaaaaagaattttttagaaggatagcaataaaaaaaagaaagaggatatttatcataacattagaaatgaaaagacaaaaaataaaaaaaaattataaagtaaaaatatatccaaaacccatgccttaaaaagactatgcaggggatttttctcgttaagtaaaatgaagaataaaaatagataaatgggaaatatcaaaggaaccgtaagtagaacatattatttgaataataaaatataatacattaaattatggctgaaatatataaataccttgaggaaaacacttacaaatagctcatttaaaatgatcaacattccaccttaataaaagtaaaacctgaatgaactaattaccatagatgtgattagaaatatgtttagagaggtatcaccgaaaatgaacgccacaggttagatttatctaatattaatagaacatataagcaaggatatttagctgtattaaaaatatgttcatgtttttaatacttctaggcattaaaaacattaaaacattttaatacagttttatcattctataacaagtttaatacaaaaactaaataaaaattttcaaaaagaaaatatagatcaattgtgtatatatataaataaaaattttagtaaagtctacagaaacttcaaaagaataacactttatgagcaagtttggctgctcagttgtaaaaaaattctcaataaatttaattccattaataaattaatacgcaaatatatctcattaaatatcaatgttccctgtattaacctacacagttcatataatttcagttagaatgtgaaaaagaaaacttataaaaattgtcaaaacttttatttttaatttttagatctagaaaacatgaaaatgcaaagaaaatgaagggaagattgatccctgacaccaggaagtagaaaaagatgatgttaataacattagtatagtattagaaacataaatgaaaatattaaaaaacttaagtaatctaaaagtagagttaagtttatatcagctgagaatatgtataattggtaattccatttaattttaaaaggatgaattatttaattaactgaatatttaccctgatataaacagagcatacagatatttatattaaaatactttcaaaggttggcaattaaatacaaaatacagagtaaacatattacaaagtacctagaagattatatctttagacagatcatgggggttggagacaaatttctaaacagaatgctatcaagtaaaagcacaaaaaagaataaagtctcctggcacaaaacaaaataaaaaaccaatacaaaccctaccaaattaaatagataaatgttaattcaggaaaaatgtacattttttccgaaatataattatttttattgaaaacgaaaaggtcagcacttcagaacaaaaatagccacataaaatgagtagaaaatgacttaggagcctgtgaaaaatgctaaaatatttggttctagaaagatggatattaacgtgactgtgagatgatactttacacctagcagaaaggcaaaacatttgaaaacttataattcattcctggcaggtatctaggaaacctgtatttttttacattgctagtgtaaaatagtaattcatgagtttaatgtgggcaatctagcaacatacttttacattaataaatgcaattttgatcctttgaatcttccttactagataagatgtagaaaaatgttcaaagatgcttattaaagcattttttacagtggatgagaataagaatttaaataaatgcttattagtaggagaatgtcataataaaagtgttatatcacacactctctaaaaagaaaaatttaagtaatacctgataatgtggagggatttttaaataagatagagttgagtaggaaaagcaagatgcagaaaatatgtacaatagtatcctgctttttaagacaataataatctctacaatgaaaaatatttatgtttatatgcagacatatatgtacatacatacaaatatgtcaaagggcacatatcccttgtttgtttgggtgatgatcatggataatggtaatgatggagggaggaaacaggtaattacaagaaatatcaactttattatattatcccaattacgtatataacaagatatttgaaaataaatggtcattaaaatgtttacacgcttacctcaaagtgttgggatatgagttgatctttacacaacacatttcctgtgtcatttagaatttgaaaaatgaaaaataatggtaaaaatattttaaaattgtctttgagatatatatttatatacacatatgcatgacatattagtatttttatttcaatatgagaagcctattaaacttttgtgatatataccaaactaacaatcactactgattccttcttaagtaatttaagaaaaagcctttatttaaaaattccattgaaaaatcatctgtaaatatttggaagaaatgtcacaggcaatcatttgatttgcttatggtgtttgtccttctgtgcaaaaaaatattgactatcccatgtgagacacagaaaaggttgtggggccatgtttttcatttcttccagcaggaaacttttctagggaaaagtaaacactaagttgacaatgacacgatttgtacagtacatgaaaaaatctacgactttcaaatatgtgtgtcattcaatgttttcactaaatattggtagaagatgctgtaatctaggacattgtaaaccaaattattcttacagtttagaagttgatttttcagaaattctgcaaattagattttcattatcttaaattatctaatcaccttatggagtagaagtgaggaattcttgtggaattgtttcctgtcaatatgtattatcattgtcatttgttcattattatttttggaatgaggtactcaatttaccttccattgaacttcaggcgctatctaaactttttattagaagggaagcataatgcctgaaaacacttttgatatcatgatcttgagaacattcaatgtaacacagtcatcagttctcagagacataattaagagtcaaccattggatttctggtaaagaagaaacaacttattcacttcatcttcctaaagtatctcacattattctagaaaaccaagattaataaacttattcttgcaacatagaaagttaaatttcctatatatatatataaaatttacctttagtaattgacatttgaatagtaacatatatttcaccaaaattacagaaaaaataaatatttcctctggagactttaaatgttaaattttaaatgtaaaaatttgtcatgctactaatgaaagcaaataagccaaaactgtactcacataaggaaagttacaatatgctctgtgatataatttatatcattctaatataagtgcttataaactagtaagttttaaatacattttaagttaactctattttaccttaaatttgaatatgtgcaattcatatggcaagtataaatatcaaatagtttaaataactgaatatatttaggtcttcccactgttgaatttattataatataaaatttgtaagttaattaaaccatttattttccaagcatagatttttcttcataaatacatgcatattatatgtattctctaaattcacatgttaatatttagccacctcaaattaccattctaaaagtaatgatttttaaaaaaatcattattcagttacatttattagttaaatatataattagacttagttttctacctaatatttcttccactctagtttggaaaaaatttgctttagcaaataattatctaactagaaaaaaataacattcactggtatatcagtattgccattttatagtggatcatgttgattgaggattcagtttagcatttttcttggtaccattctgctgaagttcctaaaaatatcttggtagctgttttcttgttcattcatggaattagaacattggaatttgcctaagaaagcttctcataatcacaaagtttggagttatgaattatttagttttaattaatccattcaacttacctgaatgttcagtcacataattagaatgtaatattaactatagcttaagaaatatttctaagaaggtttccacaatggaacacattactagctctgcaggaacaacaggattattaatcgctggcaggccagatgtaaattgtcatttttaaaaagaattgtggagaaaaaagacataaattcattcaaatcctcttgcctacgttttctgctttgtgcctgattgcttaggaaccacaacttcatagaactacaaattgtaacagcatatatatttttgttaaattctctcattcctttgtctctccagattcaaaaacttataatggttaaaggaataatgacaatactattactactaataaaaataacaatgataataataattgctgccagttaatgagaacctactgtgaaactgtaactctaatagttgtcatatttttactcttatagttttttttatttttactttaatagagcaatgctacaaagtgatttaatattacacatatagataagcagatggtgactctccaatgtactatcctagtggggccagtttttgagtccagttgaaaactgtatatttgatacaatatatggctttaggaaaagagtataatctttcaaaaataaataatgcctctgtaacacttggtagaatttctagcacctaataaaaactaggaacactcatcacaatttagtttattaatggtagtttagtgacttttgccatatttcagttgagtgagatcagtatcttttttgtaaagtcataaagaatttaagccatgacaacagtttggtctttaattgtaaagactatttcctgccatgaaagtgaggccttggttaattttctttcactaatgtacctactcttttatttcatcagaatttatagaggaaaaatgaagttttatattgcagttatatcaaataagggatttcagttcatatgtggatgcaaggatcataacttactattttaggaccctatttctgtttatataacagaagaaatgagcacaactaaaagtgtttgaaaccacacattgccgtgactaaaagaaatatatcatttgaaaaaataataaatcaatgtttacactgaagattttatatttgctaacttaaagaagatcctaaatattgatgatgggctgattgggcttcaatatacaaacttcaacatattgggcttcaacatataaattaaattgcctaagaactcaaaggaccttgtcatacaattcaggtgtttttcaaacactatatactttcgtacaataatccattactcaaaagaagacaattgacacaaaagcaatgtaaacaaataaaaatagaacaatgatttcaaagaaggggtagagcctcatctatcagcacatatttattcttggatccagaaaacaatttgccaatatcagaactaaagaagtatcctcatttgatagcttaggaaattgaagtgcagaaaatttgaatgactttttgctgctccaaaaaccaacctgaaacagatctgtaattaaccataggactcctggaccctggttctgtcctcttctaacgtgcatattttgtcactcagacatgtatcttctgtgttctcttgataaaattatatttcagcaaaaggctgttttataaaaatcattttactaaaacctaaaggcaaataaaacgtgaggggtgggacatagcagtgtggatgtagctagcaaatacaattggaaaagattattattttgctaaagtcgactgacgttaataaataagaaaagaaaaagtccataagatcttattcattattgttccagcaggacactgagacatgaatgttgaaaacacattttaattaacaagaatgagctgagttaagggaagcctcagggatactgaacaaacactcaagccttagcaaatagaaaagtattaacatctttgggcctgatgaacaagaaaagggaatataattgttggagcttaattgagagctgcaacattggagagatggatcaatgggactggtgcttctagaagacatagccattaacagaaccatgcagagcccaccagtaatcactggcatcctttcctgccaaggaattcaggatgactttcataaatatattgtaactgatgaagtgttggtaaaagaacaagtagctatattctttggcaagataagtgcagctactccacgctgcacactaatatgagtctatgttttaacaattaatcaagataatgaaagtatggaatctttatcggaataacataaccaattcaaaatgctcgtttgactataatctctataaataaaaggactaaaaacatgagcagacaatccagatatattacaattagtaaaccaaaacagctggagaagtactacacctgactaatgtttgttaaaacaaaaacaactgcttattattaaaaaaaagtcaaagttaaataacctgtttgatcactatcttagctcattaaggctgctataacaaaaataccacaaactgggtagcttaaacaacaaatacttatttctcacgttcaggaagctacaaagtgcccacagatttatgtttgatgaaggcccatttcctttcatagactgttgtcatatagcagaagagggggctaggcagctctctggggggtctctgataagggcactaaacccattcaagcaggctcaactctcatgacttaattacttcccaagggtcctaccttctaaatcatcacactgaatgttaggaattcaacatacgaattggagggggaacacaactttcagttcctaacaatcacacaatgagataactattaacatagtctatactataatactggaaattaacatatataatgttaacaataatcataatctagtggtagaagtgcatttatctatttcttccatttttctttcctgtctaaagttttaataatcaacacaaatattatttataatggaaaaattttgaataggtgaagtttcatggagttatgaaaatatatactagacaatagattaaatcatcagcacaatataatattaggttgatgcaaaagtaattgtgggtcttgtcaatgaaagtaacagcaaaaaccacaattatgtttgcaccaacctttaaattaaatgaaaagatgtgtaataatcagagggttttacacattgagttctctcaaatgtatatactgcaattgattaaattttgtatatcagtacaaatctaatatgatcctgtaatccacctaaatccttgaaattcatattactatgttatcctaaaatataaatgttgcccaatttaaagatcttacctcctaaaaatgttatgataatttatatggctaaaatactattttgttttcaatagtattacatgttgacttataaacaatcaaaatcaaactgaataattatgatttaatgtactttaataactttcatatattcatacaccataacatataccataccaattagtcaatagctgaggtggtgaggatctgaattactcctcactaccctaaaaaattgaccaacctaaatcaccccactaccaagcaactacagttcatgcatagcacagcaatgattaattaataatatctagagaaacattattgtgttacttagtactagcaaagttgaatcataaaggaggtaattggcaaatatattacttacacctaattttttagacccaaataccctacacagataattcaactattgctgaaaattagctaaaagtcaacatgcattttacagtaaacacaattacaagatgctaaaactattgtttataaaaataaacaaaaatattgtatatgacataaaacacttagacattttatattacaaaccagaaataaaaccagaattgttttcagttgtttaagcctccatgctaatctaattaatttaccaattacaacaaaaaccattgtaggtagacttttcgtgtaagattgaaatataaagattaagataatagcaatgataaaaaaatttcattctgcatgcttaattttcattatgttatttgattctggaactaatttagcaagatatgtactctgtttgtttttttaatgtgagaaaactgaaggtcagaaatattctgttagaactgtattgcttgtagaaacactaagccacttccatgccaattactaaataactggggttgtgaacttcttaatttctccccattaccttaacaaaattgacctgcctgaatctccctacaactaagcaactagagctcatgcacttcacagcaaggcctcttcaacctctgctcagcactatcatcaaaagttctcagtagcagagccttgtgtctcaccaacaggtagatactgtactttcagcatcaattctgctagatttggaggtctgaaaccaaaatagttttatcatatagaaggtactcaacatatcttgagataaattgagttttcaggtttatttcagaaatgtttactatttaatatgataaagttaatcaatacataggaagcatactaaggataaaataaggaagccttgttctgttctctggcagattataatgacagtcctaatgaaatggtagatatcaaactgcatttttattaaagttattgttattagataacattggaaacttctccctgaatatatatatcaaaataaagttactaggaatgagtaagttaactgaatctttctgttttgtttcaggaataagataggataaaaagcacacagtgaacacttgtgtatgaaaagcatgcaaaagcatccttgagtgaaatattattttacaatatattatttcacaccaatttcattatttttttaaaaattctgcaactactgcacacttgatagaggttttaatttttaatgtaattaataaaataaaaatatttaatggtataattagtaggaaacttggagattgccaacccaactattagcttggtgcgggttttctgattaatagttatctcattaagaatgaaaggaagaaggaaagaaggagagaaagaagtaagaatacatgaaagaaaaaggaaggaaggaatgtttaatgagtacaaaaaatggttataaaaaatgtatgaaacctactatatcatagcacaatagggtgactgtagttaataataaatgaattgtatacttttaaataacttaaagactgtaattggattgtttgtacctcaaaggataaatgcttgaggaaatggatgctctccccatccaaaaaaagaatgttagatataaaattatatgcccaagcaaacaaataaccttttaaaatgttgctctataaaaaagatatttcagcaattaaaaaagaaaggaaggaaagacaaagaaaaacaagaaagaaagtaaagaaatgaaaaaaggagaaaaaagaaaagaaagaaagaaaaggaattaagaaactaagagatttgcggttccaagagagattttgtcaccacaagacctgtcttaaaagagctcctgaaggaagcactaaacatggaaaggaacaactggtaccagccactgcaaaaacatgccaaattgtaaagaccatcgatgctaggaagaaactgcatcaactaatgagcaaaataagcagctaagaccataacgacaggatcaaattcacgcataacaatattaaccttaaatgtaaatgggctaaatgctccaattaaaagacacagactggcaaattggataaagagtcaagacccatcagtgtgctgtattcaggagacccatctcacgtgcagagacacaaataggctcaaaatatagtgatggaggaagagctaccaagcaaatggaaaacaaaacaaaaaaaaagcacgagttgcaatgctagtatctgataaaacagactttaaaccaacaaagatcaaaagagacaaagaaggccattacataatggtaaagggatcaattcaacaaaagagctaactatcctaaatatatatatgcacccaatacaggagtacccagattcataaagcaagtccttagagacctacaaagagactcagacatccacacaataataatgggagactttaataccccactgtcaacattagacagatccatgagacagaaagttaacaaggatatccaggaattgaactcagctctgcaccaagcagacctaatagacatctacagaactctccaccccaaatcaacagaatatacattcttctcagcaccacatcacacttattccaaaattgaccacatagttggaagtaaagcactcctcagcaaatgtaaaagaacagaaattataacaatcttgtctcttagaccacagtgcaatcatattagaactcaggattaagaaacgcactcaaaaccatgcaactacatggaaactgaacaacctgctcctgaatgacaactgggtacataacgaaatgaaggcagaaataaagatgttctttgaaatcaacgagaacaaagcacaacataccagaatctctgggacacatttaaagcagtgtgtagagggaaatttatagcactaaatgtccacaagagaaagcaggaaagatctaaaattgacaccctaacatcacaattaaaagaactagagaagcaagagcaaatgcacgcaaaagctagcagaaggcgagaaataactaagatcagagcagaaatgaaggagatagagcacaaaaaaacccttcaaaaaatcaatgaatccaggagctggttttttgaaaagatcaacaaaattgatagaccactagcaagactaataaagaagaaaagagagaagaatcaaataggagcaataaaaaatgataaaggggatatcaccaccaattccacagaaatacaaactaccatcatagaatactataaacacctctatgcaaataaactagaaaatctagaagaaatggataaattcctggacacatacaccctcccaagactaaaccaggaagaagttgaatccctgaatagaacaataacaggctctgaaattgaggcagtaattaatagcctaccaaccaaaaaaattccaggaccagatggtttcaaaatctaattctagcagaggtacaaagaggagctggtaccattccttctgaaactattccaatccatagaaaaagagggaaacctccctaactcattttatgaggccagcatcatcctgataccaaagcctggcagagacacaacaaaaaaagagaattttagaccaatatccctcatgaacatggatgcaaaaatcctcaataaaatactggaaaaccgaatacagcagcacatcaaaaagcttatccaccacagtcaagttggcttcatccctgggatgcaaggctgtttcaacatatgcaaatcaataaacgtaatccatcatataaactgaaccaaagataaaaaccacatgattatttcaatagatgcagaaaaggcctttgacaaaattcaacagcgcttcatgctaaaaactctcaataaactaggtattgagggcctgtatctcaaaataataagagctatctatgacaaactgacagccaatatcatactgaatgggcaaaaactggaagcattccctttgaaaactggcacaagacaaggatgccctctctcaccactcctattcaacatagtgttggaagttctggccagggcgatcaggcagaagaaagaaataaagggtattcaattaggaaaagaggaactcaaattgtccctgttggcagatgacatgattgtatatttagaaaaccccattgtctcagcccaaaatctccttaagctgataagcaacttcagcaaagtctcaggatataaaatcaatgtgcaaaaatcacaagcattcctatacacaacagacagagagccaaatcatgagtgaactcccattcacaattgcttcaaagagaagaaaacacctaggaattcaacctacaagggatgtgaaggaccccttcaaggagaactacaaaccactgctcaatgaaataaaagaggacacaaacaaatggaagaacattccatgctcatggataggaagaatcaatatcgtgaaaatgaccattctgcccaaggtaatttacagattcaatgccatccctatcaagctaccaatgactttcttcaaagaattggaaaaaactactttaaagttcatatggaaccaaaaaagagtctgcattgccaagacaatcctaagccaaaagaagaagctggaggcatcacactacctgacttcaaactatactacaaggctacagtaaccaaaacagcatgatactggtaacaaaacagagatatagaccaatggaacagaacagaggcctcagaaataatgccacacatctacaaccatctgatctttgacaaatctgacaaaaacaagaaatggggaaaggattccctatttaataaatggtactgggaaaactggctagccatatgtagaaagctgcaactggatcccttccttacaccttatacaaaaaataattcaagatggagtaaagacttaaatgttagacctaaaaccataaaaaccgtagaagaaaacctaggcaataccattcagggcataggcatgggcaaggacttcatgactaaaacaccaaaagcaatggcaacaaaagccaaaattgacaaatgggatctaattaaactaaagagcttctgcacagcaaaagaaactaccatcagagtgaacaggcaacctacagaataggagaaaatttttataatctacccaaatgacaaagggctaatatccagaatctacaaagaatttaaacaaatttacaagaaaaaatcaaacaaccccaccaaaaagtgggcgaaggatatgaacagacacttctcaaaagaagacatttatgcagccaacagacacatgaaaaaatgctcaacatcactggccatcagagaaatgcaaatcaaaaccacaatgagataccatctcacaccagttagaatggcgatcattaaaaagtcaggaaacaacaggtgctggagaggatgtggagaaataggaacacttttacactgttggtgggactgtaaactagttcaaccattgtggaagacagtgtggcaattcctcaaggatctagaactagaaataccatttgacccagccatcccattactgggtaggtactcaaaggattacaaatcatgttgctataaagacacatgcacacgtatgtttattgtggcactattcccaatagcaaagacttggaaccaacccaagtgtccatcaatgatagactggattaagaaaatgtggcacatatacaccatggaatactatgcagccataaaaaaggatgagttcatgtcttttgtagggacatggatgaagctggaaaccatcattctcagcaaactatcgcaaggtcagaaaatcaaacactgcatgttctcactcataggtgggaattgaacaatgagaacacttggacacagggtggggaacatcacacaccagggcctgtcatggggtggggggagagggggaatagcattaggagatatacctaaagtaaatgacgagttaatgggtgcagcacacccacatggcacatgtatacatatgtaacaaacctgcacgttgtgcacatgtaccctagaacttaaagtataataaaaaaaagaaaaataaactgagaaatcagacccacagattttaagtgattcagacatacaaaagcccttatcaatgagactgctaagaagttgagtacctctcgtatgcctggcgcatgttctttcaattactcaaatttactttataatatatgataatctttggtttctcattactcaaacatgtcttcagtcagtttaaaaatacttgtttgggctgggtgcagtggctcacaattgtaatcccagcattttgggaggcagagtcaggcggatcacttgagcttgggagtttgagaccagcctggccaagatgatgaaacccctttctctactaaaaatacaaaaaataccgagtgtggtggcatacgcctgtaatcccagctactcgggaggccgaggccagagaatcgtttgaacccaggaggtggagtttgcagtgagccaagactgtgccactgcattctagcctgggtgacagtgagactccatctaaaaaaaaaaaaaatatatatatatatatatatacacacacacacatatatatatgtttgacaccaaaatgaataagacagtatgacagactctaaatatacagcaaaataaataaaattaatgtctgcccttattaaaatttatatttcactataaaagagacatataattgttcaattagaattgcgttaatgcaagaggagaaaaaagagcactgtgaaagttcataattcagagagttaactagcttgcaagaaagttatcataataaattgctattcgtactcagttttgaccaatgaatgtggtaggcaaaataagtttctccaaagatgtccatgcccttatctctggaaactgtgaacatgttaccttacatggcaaaatagattctccagatgagattaaaagtacttatcttgagatgggaagattctcttggattataactaaaattctctggtgggcttagtataatcatacaggtccttaaaagctgagcgcctttctcagttgggtcagaggcttaaggtggaagaagaatgaggagagatctaaagcatgagagggaattaacctgctgctgctagctttgaagatggagtaagggggccatgaggcaagaaatgtgagcggcttctagaagctggagaaggcaaggaaacagattcttccttagggcctcctggaacgaatgcaacatgctgacggcttggttttggctcagtgagctctatgtaagtaaggttcttgacctacagaactataagacaatgactttgtatttttataggccactttgtttgtggttttttttttacagaagcaaaatgtatgcaatgattaaacagtaaccaggcaacaatgggaaatactcaataagggaagttgaatatgaaagcaagaaacatgctatatttgaagaacagaaaagtctagtgaagccagacagcagtaatcaggaatgagtttggtgcacactgaagctggccagttaagacaggcactggtcatacaaagtcctataatcattaggatgttagcttttattctaagaacaatggtaaatcattgtacaatcaatcatcagaaggggtaagatttgattggttagttcactaaacaagatctctcttatggctggggcagggttggtgtagtaatgttccaagaggcaggtagaggtagaacacaaattttctgcaggtcaatcttacattagtactttacataaaataatattaaaatattcagcaatatagtcacaaacacacttcttttcatgcccttaatgataacatatattatttataactggctttaagtcaggaatggaaacaggtatttatttgtgagtcattccataccaggctctacaatgagtacttctataaataagggcatttaattcaaattatgatgatgctgttgttaccctaattttaatgtgagaggactgaaaatcatcacggctcagcaaatttttttcacctcccacagaaaaggatttaaagtcaaaaccagataataccagagcaattttctttccgatatgatccaaacaatgtgcaataaagagtcccagtgaacacaccaaactgattatctggatatacgtcctttgacttgtggagaaacacactggaactgttcaaaaatgccaaacagattctccacctaaacggtgtgtgcgcacgtgtgttcatgtgcatgtataagagtgtaagtgagcaatgggatatgtctgtacagtatacctctttctagtgcatatgagtagcacattaaaaaatttagaaatgtagtatgtgctggcagtgctcttaattttataattcaaacattgtaatatgtagaaagaagagatgaacatcatatttatctatgcaaaatactccatgtgcttactcgcacagtattttctcagatgtttctcactttttcaaagataatctcttatcactaaagcgcaatacaaaacataattaagtgtcctcctgctaaacacttcagtgacttaaatatttaagagtttagaattaatgcccctaatgtaatagagtcagcacataaatatttaatcccagttctgtaaactttcagagttagcatatattgtggtagtcttcaatagcactggcacgcatagaagtaaagcctacttagttcattgcagccaatagtttgagtccgttctcctccgaagcccttagtataactcctttctgggggaaatctagctagttagccatctcctgttaaaattttaaaattttactatgtaactgctaatggatgtgacaatgattaaggaaaaaaaaagacaaccaagagagcaatgaaaagccagaaaagcaaggaataatttatgaagtgctcaatcgtctttttttttaaattatactttaagttttagggtacaggtgcacaacgtgcagttttgttgcatatgtatacatgtgccatgttggtgtgctgcatccattaactcgtcatttatattaggtatatctcctagtgctatccctcccccctccccccaccccacaacaggccccggtgtgtgatgttccccaccctgtgtccaagtgttctcactgttcaactcccacctgtgagtgggaacatgagctgtttggttttttgtccttgccatagtttgctgagaatgatggtttccagcttcatccatgaccctacaaaggacggcctaaaagcttcagtacttagaatttgtacacatgctgttgaggtagacataaagccatgacaagaaagaaggttgttctccactgaacactaattaaccaaatcagaggttcaatcttgctgtgccttggcgccatctttagagatgtcactgtcccttcacctccctgcacttcaaaactttggcacttcaaaacttaagagactcaacttttattgaggtggctgaaatttcctactattaatctataggaaactattttaaagtcctctaaactcccacagtggaattaaatactagaattgggatgatgcccccaaaatgtcttatgctggagaggtgtcaattatcttaaaaaacacaaattgcttatttgaacatgagtgaaaacaaagaagtagaactagctttcccacccccccgccaacccccgactttttcctctggctcttttgaaatagagcattaaaaacgcatgctgatgatgtgggtttttgctgtgacacttaccaactatctatattttgcatttggaaaaaaatgtgaaagcaaacactgctagtgaaagctattcctttaaaccatctaactaatttatgcctctgagaatatagtgtgtcagcaaaattgttaggtctgtgattaaaagatatgtgcaatttagtaaggtttgtaggtcagtgaataggcttcaacatatcagaaaggaaggaaaacagattctaaacagccaagcttaaaaattggaaaagtggaaaaccatgctatgagggaaaaaattagaagactaaaaccagcttattttctctagactgagatctaacgttatatgatgatcacacaaaacacagttttaatgtagtatacaatagcaaccaaaaatttaccttataatggtcacactacgcttattaagttgctatgttcttgatgcctagttctttttcctacaatgtcagaaaactagacatctataattctgatttatttgactgctgttaatgaaatgttttcaagtcgatgcaactaaaaagtctgcaggaaaattataggcaattaaattcatgcttttgtttgttcattttgtgtcttattatgaagaaactttaaagctgtttacagaaacaatgtaaaataaaaataataatttaataatactgctaatgtttattgagtgatagacacttgtttatttgtgctggtgtaaatccagacataagaggaagagctaatatcaacacacgtacagagaactttcagttgaagaaacaggcacttatgttgtggataaaatgaaataaaataagtgtagtcaaaatgaggactacatctattttttcccagttatttttatctcatcaacctagacttaactctaagtcttaccttccaacctggaataatgagtacgtttcagtggtttaatgcatcagtgcccactggtgctccctcatctaaatactctgtttaaatctctgactccttcacgcctgtaatcccagcactttgggaggccaaggcgggtggatcacgaggtcaggagatcgagaccatcctggctaacacggtgaaaccccgtctctactaaaaatacaaaaaattagccgggcatggtggcgggctcttgtagtcccagctacttgggaggctgaggcaggagaatggcgtgaaccagggagacggagtttgcagtgagccgagatcccgccactgaactccagcctgggcgacagagcgagactcaatctcaaaaaaaaaaaaaaaaaaaaaaaaatctctgactcttaaatggccctcaggtttgaagtttgatgattctgctaatttcaatgacacacttgagcagaggaagcttgatagggctgggtactcacatattaaatcttaattatccccaaggcattttgtgttcgtttgttgtgaagacttttgccttcgagaaaaataatgcttcggagttggcaagattcttcagaactctcctcaatggctcatgcaaaatattccctcacgtataaccatgctctgctattcctctcccttcagtgtgtcttagaataaactccccaatgagcttaagctattattgaatatactagaggcatctgactccaaagaacattttcaaaggtaaatgataataaaaataatataatgcactacactgtatcttaaagcatcttggaaagttgggagttactatcaattagggaagataaaacaatagatagaaggtaatatatcaataattatttggcatatatgagtgataaaaaccagtacatgtacaaaaacctttgtaagagggaattaaggaactgagggcggcgaggaactgatttgctttcatggcagcactgcaaaactagagatattctagctctcaaacatagcactgtcgtcaatctaatgaccaagtagttgctgagtttcagcactgcctgacttgtatacttattagacacttcctaattaggcagttttgtaatccgttgctttatatactattcttccaaatatatttcacttgcaagccctttcattttcttcaaaattataagtcagtttacatgctggtatttatttatgttaggcttattatgtgtgtatttccaaaaaaacttctaaagtcgcttacaaaattaaactcagtcaatataaatggtaggaattatacattaaaactttctgcaaaaaaatttaacacacataaacacaatttgttataagaagcataacaaaccataacatgtcaaaaactccattcaaaacaacttagaatgacaaacatgtcattctaaaatctcattctcagttgtttgaatggggtttttgacatattatatcttccgaacagaagagcatgtatggtttaaaaaatcatgacagattagagaaataaatgccctagagaacgttttcccacttggaaggcaaggatttctagttagcaatgatattaaatatttaaactaattattaactttccgtacaaattatgcctgcaaacccaagaggttcacattcatgcttacagaatgattttttccattaagatagcaatgtattaacatacacataattatgatttacacattgaatttattcttagtctattatacaataagtaaaagatagagctatagctacagagattaagtgaatttttgtttaaagcatcccaccaaacaagatcctagattatggtattgctgggtaggtaataagaattgttttccctcacttattcccatgttttataatttttttttttttttttttttttagacagagtcttgctctgtcgcccaggctggagtgcagtggcagcgatctcagctcactgccagctccgcctcccgggtttacgccatgctgctgcctcagcctcccaaagtagctgggactacaggcaaccgccaacacgaccggctaatttttttcgtatttttagtagagtcagggtttcaccatgttagccaggatggtctcgatctcctgacctcgtgatccaccagcctgggcctcccaaagtgctgggattacaggcatgagccaccatgcccggcctgttttataaattttaatgggtgttttcatatcagaaatatttatgacaagaaatttactatgaggctgctttacttgaaaattttgtttacatttatttgtttgaattattttaaatttgttttcatattctattttctctcaaattgtaggatatatctttgtttcatcaattccacctcaacataagtatgctaagcaaacaataaattttttaatattaaaattatttttattgtgctctttctaatcaaagttttaaaaatattttccatgttatatctttataaatatgtttaataacatcatagtatatattacctaatggatttaacataatttatttaaccagtcaccctctacttatttatagttgtttccagattttcctttgctaatataaatactgctgatgtacatacgattttgctgatgtatcagcctttgctgttccagatttcttactttttaaatttttatttttgttttagattcaagggcacatgtgcaggtttattacatgggtatattgtgtggtaccgacatttgggcttctattgctcgagtcattcagacagtaaacatagtacccaataggatatttttcaaccctttccctgatcccggcatcccttgttttgaagaatccagtgttaattattcccatctttatctttattggtgtgtctataatttaactcccacttataagtaagaatatgcaatatttggttttctgtttttgcattcattcacataggacaatgacctcgaatacatccagctgcatccacattgctgcaaaggaagtgattttgttcttttttatggctgtgtagtattccatggtatatatgtaccatgttttctttatcaaatccatcactgatgagcacctaggttggttccatgtctttgctattgtgaatagtgctgtgataaacatacaagtgcagatgtgtttttgtagaatgatttattttcatttgggtgtatacacagtaatgagattgctcagttgaatggtagttctagttttagttctctgagaaatctccaagcttcttccaaaagtagcttaatgaatttacattgcgaccaactgtgtaaaagtgttctcttttatcttcagcttgacaacatctattattttttgatgttttagtattagccattctgactggcataagatggtaccacgttgtggttttaatttgcatttctctgatgattagtgatgttgagcatttttgtttttttctggtaaaagtaaatttattacatttaagaaaaacaattccctaaaagaaatgatattatcattgaaaacagatgcaattgccattgtgtgtaatatcctgggaaaattaaggaagaaaaacaagtcataattaatgaagaagattccatccaaataccccctttgctatcagacagctacgctttctgaaactctacccctcttgttagttaatggcagaattcacaaatgttccttatgaatgtaaaatgttttacttctatcaggtagttttctgtggattatgaaatcatagactccttctagaccttttttgctgtttgtatatcgtcttttggaaagtgtctgttcataacttttgcacactttttaatggggttgtttatttttcttgttgattggtttaaattccatatagactctggatattagtcctttgtcaaatgcatgatttacaaatattttctcccattctatagatcgtctgtttactgtgttgatagtttcttttgctgtacagaagctctttagtttaattatatcccacttgtcaatttttattttggatgcaattgcttttgaggatttagtcataaaatatttgcctaggctgatgtccagattactatttcctaagttttgtcctagggcttttatagtttgagatcttacaattaagttttacatccttattgagttagtttttgtatatactgagatttaggggtccagtttcattcttctgcatctaattagcaagttttcccagaactctctattgaatagggagtttccccattgcttattttgttgattttgtcaaagatcagttggttgttggtgtggggctttatttctgggttttctgttcttttccattggagtatgtgtctatattttttaccagtactatactgtgtttgtcactgttactctgtagtatagtttaaagtcaggtaatgttatgcatctagccttgttctttttgttttggctgtaaatctgtgtggtccagggctttttgtggtagtactgtttttgcagtttggactctttttagtttcatatgaattttgtaatactttttctaattctgtgagcaatgacattagtcattaataggaatagcattgaatctgtagattattttggacagtatggctattttaacaatattgattctttcaatccatgagcacggaatgtttctccattagctggtgtcatctctgatttctttcagcaatattttgtagttcaccttacagaggtctttaatctccttgattagatgtatttctaggtatttgtatgtgtgtgtgactattgtaaacaggattgcattcttgatttgcctctcagcttgagtgttattggaatacagaaagctactaacttttgtatgttgattctgtatcttgacactttactaaagttgttatcatgtctcagagcctttagggtttgctaggtaaagaatcatatcatcaccaaagagcgataatttgacttcctagtttcctatttggatactatttctttctttctcttgcctgactgctctggctgggacttccagtactatgttgaatagaagtggtgtgagtggacatccttgtcttgttccagttcttagggggaatgtttccagcttttgcccattcagtacattggttgtgagtttgtcagaaatggctcttattatttttagtaataagatgtctagtgtgttgagttttttttaattgtgaagagatgttggattttgtcaaatgcttttctgcgtctaatgagatgatcatatggtttttctttttaattccgtatatgtggtgaatcacatttattgaattgctcatattgaccaaccttgcatcccagaaacaaagcctagttaattatagtgaattaactttttggtatgttgctggattcagtttgttagtattttactggagatttttgcgtctatgttcatcagaaatatcagactgtagtttctttttgttgttgtgtctttgctagagtttagtatcaggatgatacttgttttgtagaataagttaggaagcaatcttttctcctctatattttgaaatagttttgctaggattggtgcagctcttatttgtacatctttgtagaatttggctacaagtctatgtggtccaaagctttttgtacatggtaaggttttattactgattcaatttcagaatttgttattggtctgttctgggtttcaaatgcttccaagttcaaacttgcaaggttgtttgttttcaggaattgtctatttcctccagattttctagtttgtgcacatgggaagtgttcataagtctctaaggatcttttttatttctgtgggcttgaaagcaatgccttcgttgtcatttctcaatgtgtttatttggatatcttttttcttttgttaataaagctagtggtctatcgaccttgtttatcttttcaaacagcagcttttcattctgttgtcctttatatttttggggagggagtctcaatttcattttgttctacttttatttttgtattttcattaattacgctaggtttgggattagctgattcttgttttacttgtttttttagatttgatattagaatgttaatttgagatcttcttatcttcttgatgtagataaatagcactataaactttcactcttttggccacattgcaaaagttttgatatgtttggtctctgttttcatttgttacattttttttaaatttctgccttaattttgcggtttacccaaaagtcattcaagagtaaattgatcagttcctatgtaattttgtcgttttgagagatcatcttggtattgatttctgcttttattctactgttgcctgtgagtatgcttggtatgatttcaatttttttgaatttattgagacttgctttatgatggagcatgtgcttgttcttagagtatatttcatttgcagataagaagattgtatatactgttgttgttggatagagtagatgtctgttaggtccaattggtcaagcgtcaaatttaagtccagaatttattagactgttttctgacttgatttttctaatgctctcaatggggtgttgaaatcctctactattattatgtgggtgtctaagtcttttcatgtttctggaattaatcattatatgaatttgagtgctccaatgttggatgtgtatatgtttaggatatttaagtcttcttgttaaattgagtcttttatcattatggaattcctttatttgtccctttttactattgttggtttaaagtctgttttatctgacagaagacccctgctctttttagttttctacttgcatgatacatttttctccctctctttactttgagccaatggatgtcattacatttgtgatggatctcttgaaggcagcttaagtttgggttatatatatacatatatatatatatattataatatagactatattataatatatatataacccaaattataatataaatatataatatataacctatattataatatataatatagtctatattttatctatattatatatatatagatgcaatttgagtcttctaaatcctgagtcttctaaatccttctacaaaagagttctgtcatcctcaactcatgatattagagcattgctgaatgcaactttcaaggaaccatgctagatgacatcccagaacactatatgtattatatgtattattgatagaatattgaatgctgagactaggaaagcgctctcatgacttcatgtcaattaactttttattttatatatatatatatatatatatatatatatctagtatatatacacaatttgctattgtgtgtcttttaagtggagcatttagacctattacattcaaggttaagattgacatgtgtattttcttttttcctttcatattgttgtttcctggttgctttgtagtctcaattgtgtggttcctttacagagtctttgtgctatgtccttatgtattgtttgtgtgtttgtgtgtatgtgtgtgtttgtcagcaaatattgtccttttattttcatgtttagaacccccttaagcatctctttggaaggtctgtttaggggtaaaaaaactttcctagtgattgtttgtctgggacagatttaatttcttcttagcttatggggctctagtaagtgttttcaataatataaggagcataaatgaaagagcacatgcctaggtttgaatcctagctctaacacttatgactctggtaagtcatgtaatcacttgattcttttaaaatacattatctgtaaaaaggataataaaattcatcataatagattgttgtgagggttcaatgagttaatatgtttaaaaattttagaatactggctaatagagagaaaattacatgtggtttttttattacatcattaggtaagagagatattctactagagtctacaatagaagttggcagattttgtctgtaatggacaagacagtagatatttaagttttgcaagaaacaaatattcctaccatatttttgttttgttttatttttaggatcctttgaaatctaaaaaccattcttagctcaaaggcacgaaaatacaggccagattcgacccatgaactgcagcttgccaattcttgatctagatgatcatattccctgtagactgtatagtaaccgacagaaggaaaattaacatagccctagggaaaagagtaaaatgtcctgttgttcctttcattgtttctgatctttctactgatgaggactgaaaataatacacttgtcagaccaattgctgcatattgagtgccagatgccatgttgattagtgctaggaaaatatcccgtaactggcaagtatgctgagatttaaagttaactaattggttaagtttagtgtattccatatcattcagcttgatctatctggttttgaaagagaatatgatggggatcatcatgccttcaagctttcagtcattgcggaaattgacctcagaatatgaaattgattgtaatttcttttcatgacaatactctctcacatctgggaacaacctgtggtttatgtttgttgcttaatatatctatgttagttaagcaggtgagaactgggaaaatggtcactaattgaaaattcaaaaatttgtggtcaaattgtaagagtcccgacatcataccccatttgtatctagcatccattagctcccccattataaataggaggctgtaataacattcctgtttcttactatcaagaccctataacaatagccatcaaattcttttggtattcagttttttccattacacttttcctttgggaaaaaccagaggtaaaaaagccatttatatggttatggtatagcagtatttcaaaatctttttgcaagataactctgtatctcttttaatatattgacaatgggtttgtaaactgactcagatcaagaaatgggtgaggacttttaattttccattgccatagctgacatcagcctgtttcttatcaactcttcattctttttggtttgtaaaagtcaagtcattatttaattgcctttctatcttcatggttaagactttgcaatttattagccaatgccatagacttatgatttgagtttcttaagatcaaggccccctggttctcactgtacctttgttgcccttctgatgttcatgctcacattgtctctaatggttaagggtcaacattgcatttttgctattcaaaatcacatcatattatcactcttatcccacatttatctagttctatgaaaaaaaatgttctatcatccacccagaactatagaggacatttgatatgtagccatccaatcatgcaggttctgttccttcctgctttagtaatgtatgtcctctaggggttcctggtgagtataacatgctcaattccctgagtcttctaaatctttctacaaaagagttctgtcatcctcaactcatgatattagggcattgctgaatgcaactttcaaggaaccatgctagaagacatcccagaacgctatatgtatgtattattgatagaatattaaatcctgagactaggaaagtgctctcatgacttcatgtcaattaactttttcttatatagccatataatctgttgaatctagttcagcatacttagaatatatcctcacatgttttccatccttcttagttatctcgatctagcaactctatcagggaataagcaattttctttgggagcaggggtacagacttctctctgcagtttatacagaggcctggccataatgattagtctggatgcaatgaagataagctggataagacattaaaaaaaaaacaaacaccaccaagggatatcggccttagtgaggtgtttgtactgtctccaggccaggaaaggctgcttctgcttgcaagaggagggttatttctgctcaaacagaaatttcagaattgaggactgtaagattatccaatgtactcatacagatgtcccgtactgaatagtaggattcatttcttccctatcgatgcactgactctaaaatagaagacatctcaaaaatatttagtctcttctcacttttgctattgttatgattagtcctgggcctaatttctaacactatttgtcctattgtcttagacgataagggctttttaaattgccagcatgaagattttcattgtactctcaggtgataattgcctgaggtgaactggtcattttttttccaaggccagcaatgtcacaattttaatgttactatggaattctggagatcacaagctagagttactgcttaacacaaaggtttctcttctacttgaagttaatcctaatctgctgaagttgatattcttagtagttgtgatcctgcaacacattaagtgttatcagtaactcacatatcaacagcaatggagcttcagttgacatagtctgatgagtaaacaaggatttgttatttgagtttatttctagtgctaagtaccttaggttgaatttagccaaaagcagaaacattgataaggtcttgaatcaagtttatgtatttggaaggctatcgtgggaaataaaaatcaaggaagggagtgagacagagaagtatgaaaacccagaaatggtgggttatttaggtgattctgtggcattggctgttagttatgctggggtccctttaagaaactgtgaaatgcctcttaagaacacaggagaaggaaaagagactgagacatttatctaccagcgctgttgcagattggttgagggttgttcacaggacattatctagcccacaatcctaggttgcaagtgtgtgccttctgaagatgttgctgtgacttttaagaaaggcttgaagcagaaaaacaaatacataatgcagcaggtttctgctgtgggctgcaagtcagcatgctcagtgtcatccacaaaaactgcagctgaaatcaaaggcaagccaagggaggatgtgccaccggccactagaaacatctgctacatgtgaaataatttattttagataatcatgctgtcatatattagaataattaggtaacacatttaataatattttatctccaattttagcacataatcgctaagaagacaaagaactacaatatacatttgctaactttgccattaaaaataaattttgtataactactgtgtatattttgattagaaatagttgcatgttttaaagattgaaaagataatatatctttattttaaaaaaacacaataaggaaagaataaggttaaatataattttgctaactctaagaaatttacttttttattataaccatggaaaaagttctagttattccttgatacttttgcattgatgaattaaaaccataaccaaaggtcctatgtttcaactatatgatttggaagatatttctcaaacatgcgtaacctaaaaaaattatgactcatcttaatataggcatataaaattatccttttaatttttaaacagataatgcaataattattattgctagttttaagtctgtatataaattaaaaaccacaatttttaattaaaatgtatgtcaatttaacgtttaatatgaaaggaatgctatacatgatatatgttaatatactcttatcattaccactgcagtggcagatattgtcaaatgttattagataatctgcatttgaaaaaataaaatattccatttatttaattgaaggttagttccttataaatacattttcgttataagataatcggccttttgggtttctcttggctatatacactgtgagtactttttagattgtctattttacaacatatttataaaagttatatgtttaatacagatttttgatgtttgcatatgtttgtatatatatacatatgtgtattatttatgtgtacatagactatatatatatatatacatatacacatttggatgttactcatgatgtgtatgtgtgtttaacctgtagtagcattaatttatatgcatgaaatatataaataataaattttggttcttttgtgttatatacagaggatatttccacctaaaatttataaaaattaacatacatattttcttcttaatatgcaatttaatttagtgtttactattaacattgtgcccatttgtactttatttttccatctagaattggaattcacttacctcaattgtgtgggtcaataaattgcttttattttgtaagcaatttcaagcccagtgttctgttattcgcaactgaaaaaaaaaatcctaacttgttcttctttaaaatctcagcgaatgactttagaaaaatgagaatgtgtggttcctttgccatcctgcactccacaaaaaaaagatcagatgtaaatctggcagagaggatcagaactggctgcctctcttggttcttctctctcagtgttgactccatccacaaactctcttggtgctttttcaggtaagttcaatttaaattagaaaatgagattttctatcttctaaaacctacgtcacaatttataaggttaatgttttcttttcaatttgattaaaaactcttggtgaattcaatagttaggctctcataaatctgcatagataaatattggtccctctatattggttgtaaaataattctgaaagaaataatcttctatttgtgtggagtttgtactataaaatcttgtgcaacctttaacgccctctttttttctctttggaaaagtgggtatggcaggagcctgacggtaagttaattagtagcataatctagtgtctctgaagacaatcattgaatttctcccaatggttctttccatgatatttaaggaaaagtagcaggtatcagggaaaggaaaatatggtattaagtttatacattcctcctatttttctttcctgaagagcataagaatatacctgtctttattggctttgatgttaaaactaattaactaaaaaaacttcaaaattaggtgtgattctatccctttttctcaagtccctacattgatttataaagtaaacattcccaatgccaacactttcattaaatttgattaggaaaaatttgatttgtgaatgttgtaattttatttcactattaaggaattatctatacctgcctgcttaactgcctatttcatgtgtctctcagaaagacttttcatggtttaagaagcagaaaaccaggttgcctattcaaagatttcttcatacaattaggagagaaaggctgaacctgacagccaagatgtctttaatttaaaagtcttcgagatattgttccttggagaaggagaatattagtagggtcatttaatatgtcacaacttttttttttcaataaacattgaaccgtaccctgacccagaactgactgtgtgcaaagcattttgtcttgcatcaattcatagagtttgtgttttaagtttgaaaaaattcccaaatttcgagaactcttgtgtttttactaccatatttagtctcttatgacaaagcaataggtagtgaatgagaatcagcgtctaatgaagttttagcaatgtattgtttacatagtttacatactggaagcctgactaatgaaagagtaaattaatgaataaggtaaagcaaagatagctaatgtcaacaaagtctcctatatcatcttttctgcatagaaataatttattataaaatgcatacttttagaaagaacaaagaataaggagagaatcttacattctatgttttctatttagcttaatctaattttgagttacttctttctggacatgcaagtttatacatttagttcaaacatttcaaaaggatatctaacaacaggactataaaattgaagatttgaagataagtcatcataactacatttttggtcaagagccaatgaagtaacgtgaaattcagtgattcttttcaatgtttacatttcaatacaattgcactgaacacaaaaagttataaaaatgcttctttaatttagtaacaatttaatataacagaattttcatatagatgttttttgaaaagtgttgttttatgctcactacacaatggaagtgacatttaaatcatacttaaatatttttatcaacattatgattaaattttgttctttcctttgtgacctctttttgtactttgaaattgttttctttttcttttattcactttattttaagttcagggcggggtacgtgtacagatttgttatataggtaaactcacgtaacaggggtttgttgtacagattactccatcacttgggtactaaacctagaagccaatcattattttttctgatcctcttcctcctaccacctttcaccctctggtaggccccagtgtcttgttccctctatgtattcatgtgttctcatattttagctcccacttacaagagagaacatgaggtgtttgcttttctcttgctgcattagtgtgcaggaaaatggtctccagctccattcatgttcctgcaaaagaaatgtcctcatgcttttttatggctgcatagtaatccatggtgtatatgttccatgttttcttcatacagtctactgttgatgagcatttaggttaagtccttgtctttgctgttgtggctagtgctacagtgaagatactgtcatttttttatgatagaataatgtatatttccttgggcatatacccagtaatgtgattgttgggttgaatggtagttctgtttttaggtctctgaggaattgcaacactgttttccacagtggttgaactaacttagattcccacaacatttgatattagctatctttgctttaccttattcattagaaaaaaaatgttttttgtaaaacgaaaggcatttctttttctctcagccttgccagtgcctgctattttttgacattttagtactagtcattctgaccagtgggagatggtatctcattgtggttttgattcgcatttctctattgatcagtaatgttgagcctttcctcatatgattattggccacatgtatgtcttcttttgaaaagtgtctgttcatgccctttgcctactttttaaggggttgtttgctttttccttgtaaatttgtttcagttccttatagatactgaatattagatctttgtcagatgcatagtttgcaaattttttctccattgtgtaggttgtctgtttgctctgttgatagtttcttttgctgtgcagaagctctttagtttaattagatcccattcgtcagtttttgctttagttgagatggcgtttggtgtcttcatcatgaagtctttgtccattcctatgccaataatggtattgcctggattgtcttccagggtttgtatagttttggcttttacatttaagtctttaatacattttgagttgatttttgtgtatggtggaaggaatagagccagtttcaatcttctgcatatgattagcaagttatctcacattatttattgaatagggagtcctattcccattgcttatttttgtcagctttctcgggttattataggtgtgcagccttatttctgggctctctattctgttccatttcaatgaaatatcaatttcattgagctggattaaagacttaaatgtaaaaccaaaaactatacaaacccaggaagagaacctaggaaataccattcttggcataggaatgccaaagatttcatgatgaagacaccaaaagccattgcaagaaaagcaaaaacagatgaatgggatctaattaaactaaagagcttctgcacagcaaaagaaactatcaacagagtaaacagataacttacatgatggaagaaaaaatttgcaaactatgcatctgacaaaggtcttatattcagcatctttaaggcacttacagaaatttacaaaaaaaagcaaacaacccctgaaaaagtaggcaaagggcatgaacagacacttttcaaaagaagacatacatgtggccaataaccatatgaaaaaaaagctcaatatcactgatcaatagagaaatgcaaatcaaaaccacaatgagatactgtctcataccagtcagaatgacttgttttgagacagaatatatggtctatccttgagaattatcatgtgctgaggaaaagaatatgtattctgtagttgttggattaagtgatctgtatatatctgttagatccatttggtctattgtgtagattaagtccgatgtttcctgattttttgtctggaagatctgttcggtgctaagagttggggattgaagtctccagctattattgtactggggcctatctccctctttagcttaataatatttgctttatatatctaggtgccccaatattggttgcatattttgagttgggtttcattgcttgtaacccaaaagagagaaatttaatacaggtattgatatataacagagggttttgcaagtgacaaaccttataatatagaattagctgagctaatcatgaggatggactggacactgcctccattcccattgggttgttggaaacctcactgtataaaacccaaacattgttatgaaatgttctctgccatgccttgggattcagaatcattggactgagaattttaaggaattttgtaggacactttccagatgtttgtttattttggctagttgtgcctgtcaacaggattaaaaaggtagtgtcagatagtatttggtcatgcaaacaattataccagaaggtaattaatttgcattgtgcatgcatacacctggtggaaaaggtacttctcaccaagacatacccgacacataccttaaactcttcttccatcctgatgtgaagactgtgatgcaattattatgtcagagcctagaaaattcaagaggctccacttctttatatgcatacacatttatatgtatgatatgatataaaatatgcatcattaattctttttcaactcactgagataaagtagttcaatggctagatagcaatcatgataatgttgaattttttcagaaaaaaagcaaagttgtattggatcaagttcatccagaatccaggcaatgcctttgctacagacatatttataacttaacacttttgcaagaatttttcagggacactctctcattgactggtggcagaatgtaacagtattaatggacataagagcttaggtcctcttgtgagaaagtgataaatggtcttatttctttcggttccattgttcagtatatctctttgagtaaatgctgaagactgtaataaattctcatcatatttccagaacctcttctttatagtgaaggttgtttggatatgagcttgccagcactttccaataaaacttcactgtcaaaacgtcaattaaagtaaaatttgtcagtttgtctaaaagttggattaatgttaatcacgtcctgaaatagatgcctactttgatgtgtggtttaaaaaaattaaggattattgcacttctagaaatatattcattttcttcatgtcttatttttcaaagaacttccagcatagcacaatattatttttttctttaaattttatatattctataaatatcactgcactaagtggtaaaaactattttattttattcaaaaaataaagtttcatcacctatcactacctatacatatatatagtgatagataatcaatatagacatagaaatagatatagttgatataggtatagatgtagacatagacataaagagtgtgaatgaaactgcaggcttttcacattcttaattatgtaagtgctcttactattacaactttgtcaggcaaacacaaattaaacctaacttattaccattgcaaattctgagattacaagaagatttgaatcttgactttgacacccaatagctctatgatgctggacaagttgtggaacttctataaacttcattttcttaacctaaataatagatatataatggtttaatatgaaaaataattgacataaattattcaaagctgttggaagagccctggttacctaataaatagccataaatattggttgattgcattgtcaccactgttgtaaatctttttattgttactatgaaatatatcttagccactcagccacaaattatatacatatgtatatataccaagatggaatacacacacacacatgcacacacacatgtacataatatttcaaggatgtggctggtgattttctattatagcaaaattacatattcataaactgacagtttcttaaagttgtatattatttatagattccacattcatgttactttgtgaaattaagatgttatgcccatctgaaattttaatacttaagggtatacttttctttttacatagacaatttagaataataaaactagatttaaaattttaaaccagagattttggtagaatctggtgggagttctatccctcctactgcctggccatgagatctcagggatgcatgtattttgtctgaatcaaaaacctacttagtaccatcatgagtactgcaaatgtggcattatgtgccattataagactcccaacagagtctgaatttccaaatatatttgtatgtttaaaataaactttaaaaactctactgataaaataagttgaaaacctgaaaattgtaaatgttaaaaagtaagaataaaggccatgaattcctccactagagaaaacccttgctaaaatcgtaggtcatgtctttccaatccttctgtggatccaaaaacgtgtttccttcaatcagacactgggcaggtaagaaacatgatgtttgtatcttttgaaaattataaagaacttgcaaccaaaaaacttgcattgagttatttaagatttatacatttcaataatttaaaccacagttccaaatagcctcacatgcttctacctccaaaggccttctcttttgttcccacactacactttctgtcttaatatcctcctttctcaactctgccctttccagaaatttttgtcttaaggaactcaggaaaatttttctttccatgtctctgtggctaaaaagacagacaattaacctttaaattacgcttttcttgtaaaatctgcttgaattactttttatttattcaatgatcagtggaattttacattattattaatttttatattgtgagagagtgtcttatcaacccaaattataaagataatcacagataattataagatttgcatgtactgagtttatgggcactattatttttctaaattcttaaaaaagttatatattaatttttctaaacagaaaataatatcttaaaataatctttagaaatgtaaacaccccttgagttgtcaaatccttttagggaaaaaaaaatttatcccaaggagaaaaatatcaacatagtgcaacactatttctcaccaaggatgttctttatggaaactatgtagcttttaatgttgatactagcctcatgagtcaataagaaacactgtgtttagtttaaaggggtgaagtaacccaaagcaaagacagatttatttttttaattttgttgagaaacaagttttctgaatatgatgaactcaggggaaagttgtcaagttttttgtttgtttgtttgttttgtttttttagacagtcttgctctgatgccccaggctggagtgcagtgatggattggctcaccctgcaacctttgcctcccggattcaagcaattctcctgtctcagcctcccgagtagctgggactacaggcacaggccaccatgcctggctaatatttgtatttttagtagagacagggtttcaccatattggtcaggctgatcttgaactcctgacctcaggtgatacgcctgcctcagcctcccaaagtgttgggattacaggcatgaaccgccatgccaggcctgtcaaaacttttgtgtaaatcggtccctctgttcaacatgcaattcttccttaaaatgtagtatattttaatacattactttgttatgttttgtcatcattttgattttatcttcttccaatgtaatttttttaaataataaaatttaatatatatcaagtagcatatcttcagttcctggagcctagagctttcaccttcttgttggattaaacaaaatatttaaaaagcctcagcagttggaggagtttattcaataaatgcatatgtttattaatgtgttgtttctgaagcttttcctttgatgatctcttacccacatctttacttaacatcatatgatccaatgtaacacatccttatttgaaatattgtgtattgtaatagttataaccaattgtgactaaaattaatttttaaaaggagaaaatgctataaagcatgccaaattattattatacagttcatataatctgtcttctacttgccaatacatgccatatttaatcttttgaacattagaatttgatattaaaaaatttcatattggagtaccatggttgtaagaaaaatttctccaggtcaaataaaaaaatgtattagtgtaagaaaaagagcctgttctttaatgtttactagctcaatattggcttactttctcaatcactggaactttctactttaggaactggtggtatggtcaagaacattactctttactgttaggggtttaaaaaattctccttacagtttctctgctcaaatatttctctttggaaaactttttaaattattgtcacttttatatttttttaaccagattggaacttacagtctattatcattatctgctcatacaattttctaaaattcacttgaggtgcaggttttcattcatttaattgtgaaattctgatcagcctcaaactagagtctaataaatcaaaataaccaatatattggcttatcaaaaagaaaatggactgccataaatttctcttctctttgtatgtatgaaccaccctacttcactcatctagagattaagttcaaacctctaccacactgaatcagtgctgcactgaccaaaaacatatagcagcagtgacacaaaacctgtccttcaagacggtttctgttactatgtcttatcatagaggcttaaactttcacattagaggtttgtactggaaagaaatgacataggcaggagtgtggaagcataagaaattaagaaaaaatatggtctaatcttattaaggtttcaggttgttatctgccctataccccctgcccttcattgctaccaataatttattccaagtgcctacaaaaggacctggtccaagatgggatgaataaataactgctggcatcacaagaaataactattctaaaataaacccatttcattttctgaaatctgcatataaatataccaggttctgtgacctacaatggaaattattttctattcttcagcaggcattacaaagtataactcctcaccaacactaaacatcagtcctcaccaaaactcccgccttttccctttggcctaattcatgaaattaatagtcagacacatatttttcttgttaatgaagatcctctttctataaatattttgattgcacatatttactttaaaatgtagtttagacagggcacggtggctcacacctgtaatcccagcactttgggaagctgaggtgggaggatttatgtgaggccaggagttcgagactggcctggccagcatggcgaaatcctgtctctactaaaaatacaaaaattagcagggcatgatggtgcatgtctgtaatcccagctacttgggaggctgaggcataagagtcacttgaacccgagaggcagaggttgcagtgagctgagatcattccactgcactccagcctgggttatagagtgagactctgtctcagaaagtttagtttctagaataattgttcaaagaactattttctttcgctgttgtagtgcgtcatatactcctctctcattcaagtatttctacccttaaaaaataattttttcttgaatctaccttactctcagaactttacctctttttttcttcatttatttggtagccaaatctctttattttactttattcctggcacttattataactagttaggctatctctttatttcaagagcttttaggatgctggcaattaaatgaaacctgtctttttttttttttttctgtgctgctataacagaacaccacagaacaggtaatttgtaatgaacagaaaattactggctcatgattctgaaggctgggaagtccaagatccagaaaacgacatctggtgagggccttcttactgtgtcatcccatggcaggaggtggaaggatgagagagcaatagagatagagtgataaaagtccaaattcagggccaggcacagtggctcatgcctgtaatcccagcacttgggaggccaaggagggaagactacttaagttcagaagttcaagagcagcctggccaacatggggaaacgccatctctactaaaaatacaaaaatgagccagatgtagtggtatgcatctataatcccagctgcttgggggaggctgaggcataagaatcacttggatccggaaggtggaggttgtagtgaaccaagatcattccactgcactccagcctgggtgacagaataagaataagaatcttgtctcaaaaaaacccaaaaaatccaaattgaaattcagccttttacaagaaactcacaccaaatgataataatattaatctctacataaaggaaaagccttcatgtcctaatcatctttcactagacccaaccacccatcatgcttgtattaaggattaagttttcaacacgtactttttgggggacacattcaaaccataggagagcctctgttagttaaaatgctgggttctttaaaaatatctttatgaaaatattaaatgcacataatatagaataaaatagtactgaaaaactcaaaatcaaaaaacagcaaaaatgctatctactgctcataatttctttagttatttactacttttctgaatctattttcaatgtgttcttttaatatttatcattattttctggatagcaggctccatatatttttcactttttagttgcacttattatctactgattttctatgagtgatgatgacaatttaactctcttatactcccactctctctcaatttttcctccccagataattttaatatatttcttttatgtgcggtaaaactacattacagtttgaaacctcttatgaatatggaaatattattgagtaataaataagtacttattgttagtcacatttgtttccctgcaaccttttccatttttccaagcattagttccactcttctcacttttcagatttgtttgacttttttcaagaccatttaattgttctatataatctccaacctaacctccaacaaattagtaaaaccccttttaatcaaattttttcaacaatcaaacttaccaaatagcccattacgtaatttttctgtccttttgagacttttttccttttcttttttttttttttctagaggtttctatcctcttattccaacctggacttgtaactctaggaaaattgcacagttgttgttgtttgacttcttgtcacagtaggaattttccctctcctatatcctaaataggatctacttttttctagaaccctgtgtttttgtagttgtttactgacttaaatggtatagaatgtagttcatttatttcttgagaaaggatagtaaataggacaattttgagactacatttttccaagtagttttactctacttgaacacctgtatgatagtttgctgggtaaaaaagagaagttggaattaattgtccttaactgttaaagatattgcaatattggtcatttggctttggttatcatgttgagaaggctaatactttcctatttttttttattctgctattttttattcagatatctttaagaattagctctttatcctgataatctcaaattttagaatgatttatctttgtctggggtatccatggaattgagtgcacagtggaccatctcaatgtggaaactcatctcttccattttaaataaatttcatttgaaaaaaaaatacggattcactaaaagtttcaaaaactgtataaagaattttatgtaaccttcattcagctgccccaaagtggtgagaccttatatagctgtagcacaatatcaaaccagaaaattgacattggcatattacttttaataagactacaaatcttatacaggtttacctttttaaacttaacctatgtgtgtgtgtttgcaattgtattccatgtattgatttatgcaactttgctccatatgttaatttatgtgaccaccagcacaattaagatacaggactttcttaatcatcttaaattcttacattcttccctcattattttctctctctctctctctctctctctctctctctctcttgctccctccttcatcctctcctgtctcattctttaactgacatagaggattgactttgtttctggtctttaaaagttgggaagtcttggggtcttctctatggctgaccaaatacagtggactcaacatcatttgagttgcatgaactcaggcataaactggcttttctgcagttcaccagagcatcaacatctatctataaccttttcaggttccagactagtgacagaaattcttcagaaaagcctaattcattcctagccttctctaactccatgttattatactccttagttacatcatctttggctacacaatttatttaaaaatcatcatctgttactacaagatttatttaaaatctagatatgaatgactcttgtttcatctccaacatttattgtaaacagctaaattcatatctcaaattatctgccacaaatcaatgtaaatatcctgctagactatgattcaacatgttgaaaactaaacacatcaccttctcctttaaatgaattcatccttcttttttctgatattcttcattttccagtaagatgacttggctcatcatgccgccattttccagagtatacaagccacaaaccttatatcattgtctagtcatttctttctttccacattctcattttcttagtcaaaataatatcttattctgtgtctgatatgttgcacctaagtccaagctccttagtgcatctattgcaaattctttgtcctcactattcctagctggataattgtaatacaataatgttctgttttttctatagtcctaaaaaatcagcgttattcattcttgccactcctggcaaaatccaattagcccactttcatattggaaatctctcttgcctgtgaaatacagcatatatttccgatataaatcactcccttattgggctaaattgctactgcctatatgcaatatatatgttttaatagctgacaaatacacattctctttagcttttatatttgtgcaacctaaaccatgtgcaactacctattcatctaaaataagtatagttgttgttatgtcacactatcaagtatttagactaatctccaaatttttacatggcatattataaagggtatatttgaattttgaaatcagttttatttcacaattcaatgttttagtgggttttattcagttaaaagcatcacatctaatctttctctttttttaacttaaaagatacttttttcatttgagatttaaagtagacctaggtcacactgattctaggcatgtgaactcaaatatgaattacacagattcaggttatagctttacaagaatgctatcatgaaattgctgtaactggtcaggaactctgggagttttaatcctggttctgtcacaaacctgccttatgaccttggcaagttaatctatgttcctgtatttttatggaaaaagtcactgttgtacctgggcactttgataaacctgtcattgtagtacagtgtaatacagaaggaaaatcatagattcacacaatatatgatctgcaagagaacatgagggaatatcctgattatactttgaactagaaacagtactgcacgtaaaccactagtcaaacaacgtcagattaaatgccaagaggggatgaaatcccaagcaagagccatctatattaaaattttcctgaaaatttaataaaaaatatttctcccacattataatcattaattatacaataacaataagttatatgaaataacttgtcaaatttttgttttattttcaaatagcttttttacatgcacccaataatttgcttgctatatttttgaagatagattattaaattcccagtttaattttttttttctaaagtctcatttcacatcctttctgtcttataatcagtttctaatgatatctaagatcttgactccattatgttggaaaatcaatcacaaatatgttgatttaaaattgactgcagggaacacacctagtttaataaaacttttttgcttttaagcatgtaggttttgaagaaatcaagtcttagggcaattttatttgtctcaatctcataaagccacatttagcatacagtatttttaaaagggtgttctaattaggcaatacattcttttattaaggtccacattttttattattccatattttgcaggcttatgctaaataattaatttccatttgtttataaataaatagtaaggtatcacaaaattagttaacttccagaaaagtgtaaaccaacaaagacaaaattctgtttggggcaataaactcacttaatacctgctaacttgttttagcatgtgaaaactgaacaactgacaatttgcatttctaagacaatgaccatatatgtgataattttatggagtatgtatacatttaaagtatgagatacagagaaacatcttaaataacctaaataataagatagtagctatgaagaaggcatattcatgaaattcatggtattgtattatactactagttcacacacaagacacacacacacacacaaaaggtgtgtgtacatcttttgaattaactttattggggtataatacatatataataacatatttattttaagctatcaattaaatgttttgacacatatattcagttgtatgaatattacccatataaagttttagaatatttttgcagactcagaaatttcctcctgctccatctgtagtcatctcttaccaaccccaccttctaggcaaccactgacatattttctgtcagtataatttagtgtttttctgtcttagcatttgtttagctttttggatctgtgagtttaggttgtcatctaatatacaacttcagctgtcaactgtttcagtaatcattagtttcatcatcagtttcattttacagttgaagaagttaagataccaggtttttaagtagattggctgaaactgtggctgattagaatgaaagtcaatttgaatagctaagttttctaacttcttggccagaactttgtcatctttactactctgaatgcaccaaaagtaacaaaaaacacaatttgatgaaaacatcatagtaatgatttcttcccacactatactaaatgcttaagaaatacaacaaagttttttattctctattttatatttttaaagccgggcagagacacaaccaaaaaagagaattttagaccaatatccttgatgaacattgatgcaaaaatcctcaataaaatactggcaaaacgaatccagcagcacatcaaaaagcttatccaccatgatcaagtgggcttcatccctgggatgcaaggttggttcaatatacgcaaatcaataactgtaatccagcatataaacagagccaaagacaaaaaccacatgattatctcaatagatgcagagaaggcttttgacaaaattcaacaacccttcatgctaaatactctcaataaattaggtattgatgggacgtatttcaaaataataagagctatctatgacaaacccacagccaatatcatactgaatgggcaaaaactggaagcattccctttgaaaactggcacaagacagggatgccctctctcaccactcctattcaacatagagttagaagttctggccagggcaattaggcaggagaaggaaataaaaagtattcaattaggaaaagaggaagtcaaattgtccctgtttgcagatgacatgattgtatatctagaaaaccccattgtctcagcccaaaatctccttaagctgataagcaacttcagcaaagtctcaggatacaaaatcagtgtacaaaaatcacaagcattcttatacaccaacaacagacaaacagagagccaaatcataagtgaactcccattcacaattgcttcaaagagaataaaatttctaggaatccaacttacaagggaagtgaaggacctcttcaaggagaactacaattcactgctcaaggaaataaaagaggatacaaacaaatggaagaacattccatgctcatgggtaggaagaatcaatatcgtgaaaatggccatactgcccaaggtaatttatagattcaatgccatcaccatcaagctaccaatgactttcttcacagaattggaaaaaactactttaaagttcatatggaaccaaaaaagagcccacatcaccaaatcaatcctaagccaaaagaacaaagctggaggcatcactctacctgacttcaaactatactacaaggctacagtaaccaaaacagcatggtactggtaacaaaacagagatatagatcaatggaacagaacagagccctcagaaataacgccgcatatatacaactatctgatctttgacaaatctgagaaaaacaagcaatggggaaaggattccctatttaataaatggtgctgggaaaactggctggccatatgtagaaagctgaaactggatcccttccttacaccttatacaaaaatcaattcaagatggattaaagacttaaatgttagacctaaaaccataaaaaccctagaagaaaacccaggcattaccattcaggacataggcatgggcaaggacttcatgtctaaaacaccaaaagcaatggcaacaaaagccaaaattgacaaatgggatctaattaaactaaagagcttctgcacagcaaaagaaactaccatcagagtgaacaggcaacctacaaaatgggagaaaatttttgcaacctactcatctgacaaagggctaatatccagaatctacaatgaactcaaacaaatttacaagaaaaaaacaaacaaccccatcagaaagtgggcgaaggacatgaacagacacttctcaaaagaagacatttatgcagccaacagacacatgaaaaaatgctcaacatcactggccatcagagaaatgcaaatcaaaaccacaatgagataccatctcacaccagttagaatggcaatcattaaaaagtcaggaaacaacaggtgctggagaggatgtggagaaataggaacacttttacactgttggtgggactgtaaactagttcaaccattgtggaagtcagtgtggcgattcctcagggatctagaactagaaataccatttgacccagccatcccattactgggtatatacccaaaggactataaatcatgctgctataaagacacatgcacacgtatgtttattgcggcattattcacaatagcaaagacttggaaccaacccaaatgttcaacaatgatagactggattaagaaaatgtggcacatatacaccatggaatactatgcagccataaaaaatgatgagttcatttcctttgtagggacatggatgaaactggaaatcatcattctcagtaaactattgcaagaacaaaaaaccaaacaccgcatattctcactcataggtgggaattgaacaatgagatcacatggacacaggaaggggaacatcacactctggggactgttgtggggtggggggaggggggagggatagcattgggagatatacctaatgctagatgacgagttagtgggtgcagcgcaccagcatggcacatgtatacatatgcaactaacctgcacaatgtgcacatgtaccctaaaacttaaagtataataataattaaaaaaaaagaaatacaacaaagttttttattctctattttatatttttaagaaaatgtctttatctcctgaacttacctttcaaatagaagttgagatttcaaatattaatcataaatatttttgttctacctacttggattatagagttactcacaattaaggtgaaattttacttcagtgcatgagaacagtcacttatttatttttatgaaaaactcatctattttaattcaggcagaggataactgtcttttgtttacatgttttataaatgaatcaaataagtctcacttcttgccaaattctacaattttagaataagtaattatatgtctcttccacttagcccttttggttatcagaataacagccaattttgtgagaaggcaattttgtttaagttgaaattgatgcttaaaatgtacttctgtcttaaaatcagaatatgagtgacaatgaaacattttacaatatgttaacactgaagataatacatataaaaggaaagtctgaatgagacaatgtgcaaaatgagaacatacaaaattccttttactactaggttatcaagtaaatagttctgaaatcgtagagataaaattttgtgtttttatgtagcaataattagataagaagcacaatgcattttgcttcactggtatactttttcttacatggaaaaatatttttctcctatttttttctccatctgggcatcagaactgagtttggagtaaaaatatataaacttgttcaagatgtatgtgtatatttgctctcagagagagagacagcgagagagagaaaatctctactatgtaccatggcatgtgctgggcttgcgtacattgaaaggcaaaaatctcttaggacacctaaggtaatataccctgtgtgggaaatacaaagaatattggaatagaagcaaataatcaaattatgttttttgaatggaggaatagaaagctgggaccttaaaatgcgtaagatttagcaaggtgaagaatgaagacaaatacattttgggtagtggctgtctccaaaccttcttcaccagaacttggagaagggcatagatctcccagaaacataggcatccacatgaaaatgacaatcacaaataaacatacttacctggaacttggaggacatcatggaaaaaaaaatatataattcaggtaattagcctgtagtttctattaggatccatggaaatgttctaagatttctttagtgaaaaagaatacccagtcctgatttctgagtaatttcaacaatttacaggaaagctagagtaaaaggggccagcacaggtgtccgaaaaggaggtgcagaggtacgggagaaagcccatagttttagggcgagaggaaaatcaggaagaagcgaaggagactgcgaagaggaagtattttttaaaagtaggagtttagccaggcatggtggcgcatgcctgtagtcccagctattcgggtggctgaggcaggagaattgcttgaatctgggagggtggaggttacagtgggctgagatcacaccactgcactccagcatgggcaacagagtgagacttggtctcaaaaaaacaaacaaacaaaaaaagaactggagttattggctctgaagaatgctgtgggagaataagtgtgatgagaagagaaaaaataaattagacttagtaagtgggaaggccagaaaatgttaataagtatagttttgtttaagatacgttaagtgataatttttttaagtgccatattaagattggaattgattcagaggaataaggtgacaaagtggagacattatggaacacaagacttttaggaaggttatatgttgagggcagaaactggatacagcgttaggacagcttgtattcctttatgaagagaaatattattacatgccgacaagctgggagactgaggaaacaggactgaatttgcaagagcaggaggaagcgattcatgaacagcagctcctgaaaaggtgggatgaacacaagtgcagagttttatcttgtgcaggaggagaaacaaattagaggattaggcacatttttgtatttagtagtggcacactaatttttgtttgatgaaagataatttattacatgaaatgtaagacaaggtcataagctgcagacaaaggtaaattggaccatttctgcagagaagatataaaatagctatagagggtaatgtttgttccttcagctttgctaaaacctggtacttaacccacttcagatactaatagcagccttttattatttgcttcaaatgtagtgtaggaggaggatggaattgaatacaatattggggagagctttagatatgtactcttcttcagaaagcaaactaatgctgaaatcactgaagtataatagagtagcttctgtctaattctttttttcacttttggaattctgctgcaaagaaatgcatgcagatgtgaattcacacaaaatatctaagaccactgcatataagcaaggaaatttacataattcttgtgatatttatacagatgagcagccagctatttcccaccaaagtggacaataacaaagatactaaaatattaaatagtaagatattgttatgttgaataccatatagtcttagaaccattttccttaaaaggatctctgggtgctacactatgtcacacccacatatttgtgctttttcaataataagatcactttttaaaaacagaacaacatgttgtactttgaaatatcccattggtgcctagtgttttttcatcaaccacacgctgttggctttttcatggatatttttggcctaaaaaataatgaacaggtggtgttgtggtaagaagtcatgtgggtgttaacgtggcatcacttccttttcgcacaagagaaagcattttcagaattcaaactgccaatctactcagttggcacctgcagcctaaactggaatatcatttgagcgcaggcatgttgccatcataacagatggttatgagtgttgacagccaagtgatcatgtatgtacatcggttgtgggtgtttaaagcaagctgctcatttaagaaggtcaaacagcagtctgtccagagcttccacaggcaatattaagagggatagctatctctcaaattctatcaatgttcttacttcatgcaggctgaaatgttcatattgaaatcaatagaaaccagtggcatagccgatgccccaaatctgaaataaattaaatgattaactgtaatagcgaaaaagaagtcttccaagtcacataaagtgagttggagttgtggtaaattacatgtaatatattctttttaagtaggatgcttggtctcgtaaatttaccccaaaatagccctaaaagtttccactaaactgacctgcctaattatttattaatgttataaaatcagcatatcattacaacactgtagaacatctacaatgcattctaccaggttttttttttatcccctaagtaagctaaatctaaatacagccaatctaaaacagcatatattagtcatccaactttaagtgaatttttttaagtcataagacacacaaaaatgtatgacctccaattacttacattcgtttgttcaaccaacaatatttttatgaaagaataaatgaatgaacacaagtatgtgtagttgactttcctaaaatgctccctccacctatccccctttatccccaagtcttgacatttatattattatataatctcttccctttgagtacagataggagctgtgacgtaatctaatccatagactatggcaaaggcgatgtcattgttactttcattaggacattatgtatcattgcaactgacttcttgctcataacttcagttttttgcctttttgtttctaatgtttgcagggatcaaatgaccatgaaagagaggcctgtgtggtaaggaattgagcacttctcctgtccaacagccagctaggaagtgagggggaccactggttgatagacaacaaaaaatgagtctctcacaccagaatattataagggactgagtcttaccaacaaccatgtgaggctggaagctgatccttcccaagatctgaaatgaacccccggccccggttgacaccttgattgcaggtatgtcagagatcctgaagcacagtagcaagctaattcatgcctgcattcctgacgctcagaaattgaaataactgatgtgtcttgatttaagccactgagtttgtggaaattttgttatgtagcaattcataattaatttgattttttaaaagtaattaaaaatttgggtaataaaggaatctgtattaaatagaaaaagcaaagacatttgcatagaggagatggtctcttgaatgatattatagttgttgtctacaaccctagaagacagaagtaagtatgatccaaaaggtaaatatcataaatgctagggagagtgctaaatgatacagagatcaaaatgataaccctttgcccaaatgattccacattcatagattttctttttcatgtttgagtttccatcagtttgctgagtgattggtatttcgtagattttacaaatcaacaaatccacacatcacaaaatgatagaaaattggtaatataaatagtatatgatagaaagtagtaaagctgctggataagagtacttggtgaataactggttaaataaagtggaatattttatggtaataattgcagaaatagttgccattttttggtattaccattggaaaagcaataagcaagtttttatatacattcttacatttgatattctcaatcagcatgtgaattaggcaatatattacaagcatgataagacttggcgatgtaggccgggtgtggtggctcacgcctgtaatcccagcagtttgagagtctgaggcaggcagatcacaaggtcaggagttcaagaccagcctgaccaatatgatgaaacctcgtcactactaaaaatacaaaaattagctgggcctggtggtgcaggcctgtaatcccagctactcaggaggctgaggcaggagaatcgcctgaacctgggaggcagaggttgcagtgagctgagatcttgccattgcactccagcctgggcaacagagccagactcaaaaaacaaacaaacaaacaaacaaacaaaaacagacttggcaatgtaaagcaaattgtgcaaaatctcgttcttgtaagatgacctgcagtttaatctcagggacgtctgatttcaaataccatgtccctaaacactttgtaggctgctcaaatgataaccgacttcaaagctggttagtgcagttttaaattaataacggagtgaaaataaagagaacaaaataattgcataattggtttgtaatcataaatcttccactatacagttatgtaattaaaaacaatcttccatctctaaaataaggattgtttactaaatgatctaatctttccattataaaattccacagttatagaaaagcaagtaaggcccattttgacagccttgtgctaggaagtaatgtatatataagttttctacttggttttgagagattgaattggatggtatactggaggttaaaactttttaaattctactttattattacatttgaaacttagaagtgttgttaataatttcttttgactgtgatagtaaaaatatattatgttctggtaaagcacaagaaaatgccagcgaatgttttctaaatgagggtagaagggaaaaaaccggtgtgcagatggaagtattgggttttaataagagatacttttctcattgttgctgaagggaaggggggtagcagaaatgatcaattttagtaccaacatgttggggaattaccatttcatgacttttatttgctcttttctacatgaaaaatgttcattagtttattagagaagaaagtttaaaaaatggtatggcctgcaatggcttgatgtaatcatgaagagtgaacacagaacaaagttccttgagtatcacaaaaaaataatgtaggatcaagaactagctgtcactagtgactgtgaatgtatgctatagtggtatctatttgattttattcatcagcgcttattgtacaggggcaaatttacataatttgattgagatattttacacatgaataggtattacttgggaagttaacaaattatggaagagcaagggagttaaaagaacaactgaataatggtccatgaataatggtctcagttgcatatgaagacaaatacagaccatgataataaaaggatatggttagagattaggatatttaacatagtaacttcaaagttttagttcccaatgatccagcattgagcacatattggaagacaaaaatgaaatagaaaaaagttatttataggggattgtgttttttctcaagaatatgaaggcgtcctggtgggttgggtgggattctgtagatcagattttaagatcttagatgaatgaagataatatctgtaaaataagatgattatatagtagaaagcagtatatcaaatggcacaatcatcaaagaacagtgagttctacaagagaatgaaggatagttggaaataaggaaaagagtgattctacttcccaacatgaggcatatgaaatgtgaaaaaataaaaaagcctctatttgaatggattgaagaggaaacagtgtgtttagttaaaagacagaggtagaagtaacttttggacaaaagaattttgagggaacattatacgctattgaaattagaacacagcatgcagtttccataacagcagtattagaagagatggggaaatgaagaggaaactccatcggggaaaaggaattttaaaagtcactagaaaaaagaacaacttgtaagactgatgctctgagaaacgtacatgttaaacactgaccaagaaaaatagtggcaagtggtgaagttgatttagtcttgatgttttcttgcagaacagagagaacctttacgtttaatgaaattcagcagtagtctgcgagggacagtgtagaaattatggtatggaggtggacattacttttcctgagttagtacagctgacactgtcagcaagactcaacaatcttgccggagtgagaagatagtggcaccatctggtcattactcagttcatccttgttggggcagcatcctgcctagttagaagttgtttatgctggttcaccagatttgccatttgtcaaggttctgccttatctccaagagattttgcagtgattagaaaatttgccttctgtaaaataataataaaaataaccccagagagtcaaggattattacaaggaatgacacaaaaattatattgccaagggaagatttgtataccatatgcctctactgctagagatgtagagatttagcagctaaaccaaaaatgtatacatcatcagttaactattcatggcatgcagaaggaagacagaaagcacaaagaaacaaaactacatttttaagaaaagcattatttcctgatattgagaactgggaaaaaaaattttcttccacatgctttctttgaaagaagcttatggaaatactaaaaaagtatcctttaagttgtctttataagtggccagaaaaaatgtttcaaagtttaaaaaaaaaacatagtatgctatctcagtcattttggctgctacaagaaagcactatagatgggtggcttataaacaacagaaaattatttctcaccgttctggaggctggaagtctgagatcagggacccagcatggttgggttctggtgagggccctcttctggttgcacactgccaactttttcttttattctcacgtgactgaaagagagcaagatagttacctgaaagttaggaatgttttttaataatctgttttgaatgtgataggaaaaatattttatgttctcgtaaagcagaaaaaaattagctaggcataggtgcgcctgtagtcccagctacttgggaggctgaggcaggagaactgcttcaacccaggaggtggaggttttagtgagccaaggtcgaaccactgcactccagcctggcgacagagtgagaccccatctcaaaacaaaacaaaaaaaatgccagtgaatgttttctaaaagaggatagaaggaaaaaaagtcagagtgcagatagtacctttcataggggaaataatcccattcatgagggctccattgtcataacataattacctctcacaggtccatctcttcatactatcacattggggaataagatttcagcatatgaagtttgggtgaccacaaacattcaatccatgcatatgctttatgctgatagttgtcaaaatattaaaacactatcgataaagtaagtcaagctcttgatgtaattgatatgcctacttttacgcttctcgtatttaatccaaaataaaattttgaatattcagataaatgaatgggtcatatgttctttgataaatccttcataaatgttctattattatatcaggaatttgataaactaatatttggaatattaagaagtgtttggttgttttacaagacaaaataaggttccataggtgaccaacaaaatttctactctgcaagaaattggagtgcaaatatttcatagtgcttgttaatggcaggcatgcatgctttaatattcagtgaggcagagggaagggttaagtcctctcagaaaaatttaaaatttggtcttgccttcctcagaaaaacgctctaagtccatctgttccaataatacttatagacggtcatggccccaaagttctatgtcatggagattagatgtaatgatttttagtttggaaaatattcaaaacaatgtcctagtgtggtttttgtttaaaaaaaaataaattaaatcctcacaggcatttcatttaagcaatgtggttatgctgaaatcttcaaaatgagggttgtaaatttaactctcacataactattacattggatttctgaacatatgccatgaaatgctgaaaaacaatttacaaagagggtggttttgtttttagaataatcagtgttactgctcgtatagacaataattagagtacaagaacaatggcctgttatgccactttgtcatagtgtgggaaataacaccatgtatttggaatacagataactatcagttgttttaattttaatagtagagcatctgaattcggtctttgcagaaatagaattactctaaaataagtattacaattcaaaaagatgtataagagtttaaactatattattttgtattactagtaaacaattagtcaaatttttaaggaggcaggattttatatgatttggaggacagacattctgatcaaagagacaggctctaagattactatagatatttcacactgagatgagatgccctgaacaagtgtgatggaactgacttagagaaaacaatgagtaagactgagatatcaaagaaacatggaacagacatttgtatcctagtggtatcagaaattttggtttaggacaactatgtaatgtaatgccagaatataatcctaaaatctaacctatgtgtactatttaacacctttactcttatttgtaatgacattcattgcatgcatttaagtgtgtctacaagagataagctttaagccgctgtttaactgaatttgaaacacttcgattaaatttgaaataccctaaggtatctttcatatacataactatacatatcaatattcttcattttggaaaaaaaaaatttccttggacaaagaaatggatatatctgtggtggcttagctctttttgaatgctcacacatccttacacatggctcctttccatttggacttgagttttcccatgcacacaggaagcttttgctggtttatgtgggatttctgctcatgcttaacagagactggattttcataactactactcttggagctgtttattacttaagaaataccgggtaagcaacctgagcaatatttactaggtaaatgggtaatatttgtatgggtttataagcttaacctctcaaatagtacaataattcagagagaacagaagcatggtgtaccattcagtcaataatactgtttttgtagaaggaaatttaactatagaaggcgaataatcattgagtaccagtattatcaaaacatttgcttaacactattacatacgcaaagtttgaagaaatgcagaataactatttgcctaattcgttttaaacattaaatgacttttgccaaatctagacctacttactttgcttctcattttcagttgtaatcttttaaagaagtcttgagacttcaagaatttaatgttaatatttaactcatgatgtgtgcttgtacaagtttgtgctcagcctggttcaactgagagtttcatgctggtattgctttcctcaagtgagagaaagcatttagtatttgctaaatagctttatgtccattgtaaaactgcctgcatttttgtttatcttgaccttttctttctctttattattatttacttcataaacattccatgatgatgagaacatttatctttcacaaatatctctatttctaattttttagaatatatctttgtccatctttaatattttgtgggattagccgtcccacttcagcagaacagaatacagtatgacaatgtaaaggtaagcaacccagtaacctttataatagtaaacaaaatagtcatttacctggattagatggtagaaatttgtctttgtagtagactaccaagtccacgtggtacgaagaaataatactgtctcaaattatttaaatgctaatatgatcagcatgtatgaataacagagctgaacttcaaataatattaatatttgaaataatatcacaaacaggtaaattcatggagtgcttatgattataagcattttgtctacatgaaaattatgtccatttttaatattagaaactttaggcacaaaatattaagtgacttgttcttcctctcatattaaatgcattctcagtgttaagtaaatgtgtttttaaaaccttgatttcccaaagaaataataaagtgtagtataaaatagtataacctcttgtatagcctctgatttaacctctaatgaaaaaacagaattgtcatatatattcattcataataaattgcactcaaatttggcctcatatgctcttagaattgtaaaattttacagtggaaagactaggcctttagtaaaaactcttttagagatgaaaaaataaagctaagaaagtttttttataagtacttagtggcatatctatgacgaaaatccttgtcataatatgtacgcatttttcatatgtatttcttatttatacactaaaatgcttaagttgtctagggtgatttccagcgtttgcaaataagaaacctgatggacaggcttaaacaaacacaaatatatagcaaagcactctttgagcctacattaccctgtaactattatcctatttttattccattcacaatggaactactaaaaaatgtaatccaaatcagctcacaattctcttcccttacattctataatttaaccagaatcagactcatctcttcaggcctctgctaagctctctcacacttttacaaagcaattcaatacagagtttgtgatatatccaattattccaccccacatgtcattccctaatttttcccctcttagtaattggtgccactcattattcagttgatcaggtaacatcccaattgtcattcttaatttcttgctttcctttaaaaccaagatctaatacatcggtgaaacttgttgtggtcactaccaccaaaacatttcaagaatcttaccacaatttcttacttgcattatcaccctgctccaagcaatcatctaatctcacctgtattattacagttgccgataactgatcacttggatgcatcctgtgcttgctattgctagtgaatacagtcagagtaatattgttaaactcagtctgaaatcatcaacctctagagaatatttaaagccatgaaagaagcctgagggctcacaggaaactatataatgccagttaggaagatcaagaattattttcaggcactccaatgtttagaggacaggaggatgctgagaaggcagaaaggagttcagagataaataagtagtaaagtttagagtaggctcaatccagtaggtaggtgggagcaccgagacattatattcatgatattcatggttattttatattgtgttcattaatggatgttaattagctttatttatgattttacaatatgtatcaaaatatcacatcacatatcataaatacattccatttatatttttaaatttaaaagataaatttataatttttttaaaaagcaataaaaaatgcaatgccattctctcattggaatctaagatggtctctaagaaacattgcctaatatatatatacacacacttacatatatatatatgtgtatatacacatacatatatacataaacaactcatatatatattttttaagttttattttttaatttttaatttttcgtgggcaccaagtaggtatatatacttatggagaacatgagatattttgatgttgcctgttatattttgactgtaacttctataacgatgaacataaagtttatatttagtttattttcaagttaccatgtatttattttagtttatgctaggtaagttaaacacatttcaattctttcgatcattatgaaatgatttttaaacttttttataaaacaaaattatctcgctctgttgcctaggctggagtgcagtggtgcaatctcagctcactccagcctctgcctccagggttcaagcgattctcctgcctcagcctcctgagtagccggactacaggtgcgcgccaccacgcccaggtaatttttgtatttgtagtagagatggcatttcaccatattgtccaggatggtctcgatcttctgacctagtcatccgcctgcctcagcctcccaaagtgctgggattacaggcgtgagccaccacgcccggcctgcatactgtttttcatagtgattgcatcattgtacattcccatcaaccgtgttcaaaggtgacaattttccatactgtcaccaatatttatattttttatatatagcaaccatattagcaggtgtgagctgataactcactgtggttttgatttttagttcccttgtgattagtgtgttgagcaccttattttatatctgatagtcatttgtatgtcttccctggagaagtgtctaagttcttggtccattttcactttattttttatttagttgggtaagttccctgcgtattttggatattaaccccttgtcagatatatgctttgcaagtaatttctcccattccataaattgccttattatcttattaactatttcctttgttgtgcagaggtcttttaccttggtgcagttcccacttgccagtttttattttatttgcctgtagttttggtgacatattcaataactcatggccaaaggcaatggaaaggagttttctcctgttttcttctaagagccttacaattccaggtcttacgttcaagtctttaatccattttgagttgatttttgtgtgtagtgtaagatgtagggttccaacttcatacttttgcaagtggatttctggatttcccagcataatttcttgaaaagtctatcctctccctattgtatatgcatgatggccttgtagatcagttgaccatatacacctacatttatttctgagttctcaagttttttaattttttaaaaacacatatatacatatatatattttttttttttttttgagacagaatactgctctgtcacccaggctggtgtgcagtggcacagtcatggttcactgcaacctctgcctcctggattcaagtgattccgatgcctcaacttcttgagtagctgtgacttcaggcatgcgccacctcactgggctaatttttgcatttttagtagagatggggttttatcatgttgcccaggcccatctggaacccctggtctcaggttatctgccagcctttgccagcttacagaaattacagtgctgggattacaggcatgagctacgcatgcccagctgagccctcaattttgtttcattggtctatatgtctgtttttatcccagcaccatcctgttttgattactatagctttgtaatatgttttgaaatgaggcagtgtgatgcctccagttttgttctttcttctcaagatgactttgtatatcctgggtcttttgttgttccatataaattttagcactatttttctatttctgatttaaatcccattgggattttgatgggaatagaattccaatttatcacgtaatatgaacgttttaacactattaagactccaatacataaacataagatttatttccatttttttttctaatttatttccttaatgtattgtagctttcaatgcaaggaaaatgtcttttacctccctgggtaagtttatttctattttttaatgggattaattctattataaatgagacttttaatttccttttcagattgcatgttgttagtatgtagaaatacaaatgcaactttttaaatgttgtatgtggattctgtttcctgtaactttattaagtatatttattagttttaagttttttttctttctttcagattttggatgtcttttatttcttttttcttgcctaaacgagcccacatttaatatcctatttaacagtgaaaaactaatggcttttcctctaacatcggaaagaaaacaaagatccccactcttgtaaattctattcaacatagtgctggcagttcttggtagcacttggcagttctagcagtgcaaaggtgagaccattttaatggataatttgcatacagtttttctgactatggaacataggtgagactatgtaaattttccaaataatctgagacacttcagtgaaagttcattatacagatgaactgaaagcttggtatttttttcttcatttcctccttctcctcattcttcttctgttactatcgctaaggatcattgtgctaacacttcacataggttatcttctttaatcttcacaacaaccctataaataattaatcatcagcaattcagaagaagacagtgacttactaaagatcacacttgtcatcagaagtgttgggatgaacccaggtaatgtgctgtcagagtccctatgattaaccaacatactctactttaaatgccttgaagaattagaaaactcttcaatctatatctttgagcctgcaaataaaacttcacatgtacccagtgtaaaaatataacagaaataataagaatcagtataattttttaaaatgtgaagtatccttgaagattccaaacactgtaaaatttagcaataaactgatgattatgagtcacacttttcctctacttttgagagcattaccaatatgttttaatgacatattagaaattatgatattttaaaactaggttgattgagactatatgaaatgccattgagatttttggagtacttttgtctttctaaaaataggataatctgagggtaaacaaatatatatgtatatatatatagttataaatgtgaattataatttatgtttcaaaattgaattatacagcatttttaggaatccatgcctatagggtaagatgtggaaatttaaggaaataaactaataaaacatctttactataacctaattattgtattttctaataattcagagtttcttgatactaaaatagtttgtgttgtcacaaataaataaaaacccatcactataatcttgcataaaaaacaaaagccaaaataaattttatttatgcacgagtaaatctatatatagtagctaatcaatatttattaacaataatttttttcaaagaggagaggaatcatttttgatgcaaaaccattaatagtcaaattaaaaagtacaatattgaacagtattaaagctgtatgcaaaatgttcaaattttgttagaaatgtatacatttatatatcttttcacattctatagccatatacctgtgtgtttacgggaacgtatgtttttatataactccatttataaatacaagtatattaaaatctaaaataattatcaacacctataactacatattagtaactatatgaagttatatattcattattatatgcaaaaactcataactaatgtttagaatacatatactaatatttactaaatgtataaaattatatatccatgtcattttatagctacagatatttttatatctttttaaaattttattattattatactttaagttttagggtacatgtgcacaacgtgcaggtttgttacatatgtatacatgtgccatgttggtgtgctgcacccattaactagtcatttagcattaggtatatctcctaatgctatccctccccgctccccccaccccacaacaggccccggtgtgtgatgttccccttcctgtgtccatgtgttctcattgttcaattcccacctatgagtgagaacatgcggtgtttggttttttgtccttgagatagtttgctgagaataatggtttccagtttcatccatgtccctacaaaggacgtgaactcctcattttttatggctgcatagtattccatggtgtatgtgtgccacattttcgtaatctagtctattgttgttggacatttaggttggttccaagtctttgctattgtgaatagtgccactataaacgtacgtgtgcatgtgtctttatagcagcatgatttatatttttatgtcttaaacaaattcaccgatattttaatgtgtttatctttgcataacaggatttcaagtaagaacagcagcatgggggtaactactcccatgattcaattaccacccaccaggtccctcctgtgacacatggggattacaattcaaatgagatttgggtgagaacacagccaaaccacatcattctgcccctggctcctttccaaatctcatgtccttccaaatctcatgtccaaatcacatttcaaaacacaatcatgtcttcccaacaatcctccaaagtctgaactcattccaacataaaatgtccaagtccaaaatctcatctgagacaaggcaatttccttctgcctataagtctataaaatgaaaagcaacttagttacttcctagatgcaataggagtataggcatggggaaaatatacctgtttcaaatgggagaaattggccaaaacaaaggagctacaggcctcatgcaagtctgaaattgaataggccagttctgaaattatctctttaatcgatgtctcacatccagggcatgctgatgcaagaagttgactcccatggccttctgcagctccactgctatggctttgaaggtatagctcccctcctggctgctttcacaggctggtactgagtgtgcagcttttccaagagcacagtgcaagctgtcagtggatctacaattctgcagtctggaggacaatggccctcttctcacagttccactaggcagtgccccagtggggaccctgtgtgggggttccaaccccacacttcccttccacattgccctagcagaagttcttcatgaggggtccacccctggaacacacctctgcctggacatacaggtccctccacacatcctttgaaatttagggtttcattaaacctcttgagttttctgaattttctaagaatgcaccagaattttaattattcaaaatgtccattgaaactttgctaagcactattttcaaaggtctatacaagcgaaggatttggatcagttgatgttggaggggaatacatttgtgtaggtaggtagatagatagatagatagatagataggtctgatttattaagaatcattcaccaggtattagtgttacattttagaaagggagaaagagaataagggagagagcgtatgttccaagagacaaagagacagaaagatagggatattcagaggcaaaaatacacgcatatgaagactaagagatagaatctcagaaacaaaacataattcatgaatctcaacattgggagatactcattgtaccttattttacatgtctaatcctaacattataatactattaaaactacaatgattaattgaattttaagctttcattaagtccactgacttatggggaatcccttacccttctcctataggagaaaatataaccttagcaaactaacacaagaacagaaactaaataccacatgttctctcttataagtgggagctaaatgttgagaactcatggctgcataaaggggaacaacaaacactgaggcctatccgaaggtggagggtgggaggagggactggatcaggaaaaataactaatgggtactaggtttaatgcctgagtgatgaaataatctgtgcaacaaaccgctatgacacaagtttacctgtgtaacaaacctgcacatgtacccctgaacttaaaatgaaagttaaaaagagaaaccttacaaatatataaagtttaagaaaaaaagggaaatgtcaaacaaataaacaacttctccttattgaaaataaaggaagagacttgtcccattcccttttcttagagtattaactttacaaaacatttagtttctgtctctgtttcctggaaatgtatgtacattcaggaaacagagttaaataaccttgctagctttatgacccagacatgttttcttaattacatgggacaatttcattgatgtattcatcaaggaagaccagctcatctattttccggtttctatgggatggtaggaatctaatttctgtagaagtggcttgctccaacttgcaaaatcaactcataaaaatgatataaaatgggctgggagtggtggcttactcctataacaccagtactttgggaggctgaggccagcggatcacttgaggtcaggagttctagaccttcctggccaacacggtgaaaccttgtctctactaaaaatacaaaaattagccgggtgtggtggctcatacctgtactcccagatacttgggggtggcttaggcaggagaatcgcttgaactcgggaggcggaacttgcagtgagccaagattgcaccactgcactccagcctgggcgacagagcaagactccatctcaaaacacacacacacacacacacacacacacacacacacacgaggtataaaaacatgaaaagcttattttataaaacataaaaatatgagttttcttctttaaagaaaaccaaatggctaactcagatagtcatcccaaatagcaagtgagtttatgatgaattatgtatgaaaaatggcactttcaagtcctctacttgagaactagttgtttatcttgagagcatgtatgcaaaaggttatatctgcttggctctgcaaagggtgagatttcttcctaactctatgatctcttagcggattgcctgtgatcccctaatactcttgtttattgcttaccgaataataaaacttctttactgcccttctacttttgtggacaggctttctggtttggaaggagattttatttttaattatatttccccaacacttccaactgctgattaaactattggaattacgaaattaataatggtgaggttttttttttaactttcccgaattggctcttattctaacctttaaagtttcaaatatttctaaaatatgagttgcaaaccttgatctatcaaaatttgaatattcatcttctaaataaggatgttttcactctttcttttttattattattatttcattggctaatggaaacagaagataatatcctggaagaaaaataaaattattaatagtaaaaatacaataattcacaggaacaaaatataattcttctattaaattaaatatatttcttttatttttaatagaaataataatattaaataaaaatttatcggaggtcattgttttagactgagctcctgtattaggccccaacagagcagactaaaccagaatggagtcccttgagctcaatgccatgtaatcaaactggactaattttgtgaagaacagaagattcacagcaacccatcagaagaagcccaacttacttgagctgtcatgataaggaagtcccatctgctttaacactatagaaaagtaactttcaaaagactagtcagcttctttttttctcatttatgctttcttcagcccttttctgccctaaaaccaaccccttttgctcagctcatcagagcactcattctattttgtgagatgctgcttgatttcaaaatcactgggaaaagccaattaaaaaaaaaaactaaatatattgacattttgtctgttgacaatagtggttaattctaaaacttcttgacttacttttattttctataccattgtagtaatcagtgtgttcagttaactaaagcagcagatgtgatacatgcctagaaacaaagtaaaatcaattgacacctgaatttccatagtcattacttttcattttttcattgtgtttgagataatagtattaaatgtgaaaaattaatattcatagacaaatattatgccagtaggaaaaaataatatatcactagaaaccaccatagctataacaaatagagttctttaacccataaaaaagattgaaacctcagaactctggatattaattaaatgtgaaggctgaaaaaattttgttgtgattacatatttaagaacttgacaattgtataattagtactaaattgataagacaaatccttcaactacacaattcatgctctgtttctccactcatagcagtttataaaatatattcaaatgaccaacaccacttctcatgtatgagtgaaatatacatatgagaatcacatttttattttattaatagtcagattgctaaactaccagaattaattccactctttactctataacacacaactggttattgtagaaaagatatgttcaatctcagttccttcccaccagatcatttgtttcatttttaaacaagttaaacaaggaagttattagatacaaggagagaattttaagtgggtatttctctcatttaagtggatatttctcacaaaatttaaaatgggtattttaaaattgttttgtatgttgttgagatagttaactgtagctgtataaaataatgttttcaaaaatatttactcactaaatatactgatcactgaagacatatatactactgatgtctgtattttcaaagtcattaatgataacaattagacccaatgtttattgttattagaagacactaaacatattaagaatgcgtttttacatttgagtctgtgaactgttaaaatgtggaaaataaaataacctttcaagaaattagttctgataaaactaaaaatagatgataaacctaataaatattaatgatttgatttgttaaatttaccaagagggctgtaaataataaatataataaaagtagaaaatattctgactatacgtatttcatttcaggaacaaattacttattgagaaaattttggattgataaaatcacagtatgaattctgacttggttttagctaatccaaacagaaacttcacaatacagtggcttaagcaagacactttagattttctcatataaccatctagaaagaaaaaggctaaagcttttataaaggttaccttcacaagttatccaaaaattaaactatactttagtttgttctcacataaccatctagaaagagaatggctaaagcttttataaaggttaccttcacaagttatctggggccccacactcccactacactttagatctgtcatctctggcatgtttctctgatctacctgatcaaatgtatctcatttccatgtctagtggaataaggtggaggacagggaagggggcaccatgccttgttaggaaaatacctgcaagtaaagcacagttcttccccgtgtgtaccactggtcaggtcacagtcactttatcacatttaccatctaatacaagagatgatgtggagtaggattttagttttctacagaatcatacatccagcccaaaaccaaacaaaataaggaaacaaataaaatacaggtcttttactataaagaagaaaaacaggggaaactgatactgagggaaaactattaatagcaatctagaggacaatcatcaaattaggagagaaaatattgaaataaattactaataattcatattaaattttagcaagattagtgcagtaatttgtagtgacttcctatttaggcaaattattaaacatatttttctttcaattaataaacagccaaagaattgataacggtgtttcaaatatgcaaagtaatcctaaatttctttgttattaggttagtgccatcattctttaccatatcaaacatttcaaaatgtaaaattatgtgtttttaaatatttataaaattatcaaagtgaaacctaaagtaacatttttaattcatttatttttaatcagctgtaaaatagttataattttcatcacttttgaagaagtataagaaacatgagcacatgcacagtctgattctttaccttcttcgtcatacaataaggatgacattttaatactatgctgagctctaaattgttacatatcaatgatattgccatattaagatagcttttccttgtccgggaaaggctaaatagaattttgggatatatcttaataaatgcgagcagattacattgttttagacatcccttacaatccattacacttgacactttaaatccacttattttactttatgtaaattaaagctcaatagaataattaattccaggagttgagagagacatgaaatttcataagtaaggaatctgctgtctcactatacagatttagttacactctatgtcaaaactctgagatacttttctcttgaaaaagtatatattaattctatgaaagttttgagttacaatgtccagaataattccttcatggtataaaattatattcccgggggtggagcaagatggcagaataaagagtttcactgatcattcccccagcaaggacaccaagctaacaactatctacacagaaaatacactctcatgagaaccaaaaaccacgtgagcactcatagtacctagttttaacttcatatcactaaaaaagacactgaagagacagaaaagacagtccagaattgccaacgccaccctgtccccacgccccggcagtggtggcatggtgctgagagcatctcttggtgctgggagaggggaaacacagcaatcttgcaacattaaaccctgtgctcttctgtaagagcagaaaggaaaatcagaacaaacttagctgacaactgcccacagaggaagcatttaaaccagccctaaccagaggggaatcttcaatccctaacaatgccacaacaactgaattaccatagcaattcaggggtctcaagtaacacaggagtctcaaactgaaatgtcaacaagagtcaagtaaatattttagaaataggctaccctgaactagatgggttcgagaggaaccagtgaaatcccaactttatgtgaattatcttaattgtgaaatgttggcaattaatttacaatatttttaaatgtctgaactttagtgcctgcaaacctcaccaccgaagggtacaacactttgtgtctccaagtaaacttgaaaggcagtctaggccataggactgcaattcttaatgctgaactagggccagaaacagtgtgttagggggcatgtgacatgctgagacaccagctagggcagccaagggagtgctggcatcctcttttctgaccccaggctgtgcagtttgtagctccaaacgagacccctgtcttcctcttgagaagaggagagaaaagagtgggaaggactttgtcttgcatccaggataccatttcagccacagcaggatagggcatcagtccgttgtgaggcccccattctaggccctagctcccagacaacatttctagacacattcttggccagaagagaacctgctgcatcggtggagaggacccagtcctggtagcatttatcacctgctaactgaagagcccctgggccctgaataaccagcagtgatacccaggtactaccttgagggccctgggaaagcctctgagacttgtgaacttcagatgaagtccccagaaccaccacagtatgtcaccagctgtggtggctctggggcaaaactacttctgcttgaaaaaagcagagggaagagtgaaggggactttttcttttaccttaggtcccagcatggccacagtggggtagagctaccaagcaggctcttggggtccctgatttcaggacttgactcttagatggcatttctacatatgctctgagccccagaagggcacccactgccctgaagggtgagtcccaggccaggtggcattcaccacaagctgacttaagacatcttggatcttaagggaacatcaagggtagtctggcagtacttcttgtggcctcaggtggtagtggctatgaggtgaggcttctctgcctttgggaaggagaaggaagaatggaaagagctgcatcttgttgtttgagtccagctcagccacaatacaatacaacaccaggtagacttctatggtttttgagtcaaatctctgactcctggacagcacttctggacccgcccagggcctgggggaccttgttgctcagaagagtaggacagaattctggctggcattaccacctgcagaatgtggagacccagggccttgagtgaacatagttggtagccggggagtggtcagagcaggccttgggtgagacctagaactttgagggcttcaggtctcactgaacacagtcatagtggtggtggccacagaggtgcgtatgtcactctatcctcagctttaggtgactcagaacagagacagaaactctaagtttggagaaagtaagggaagagaacaaagcctctgcctggtaatacagaaaattatctcaaatcttgtctaagactttcaagtctatgagtctgcaagaaccacagcattactgggcttggggtactgcctaaatcagatacagcttagatcacagcacccaggtactttcaaatatttggaaggccttcctgagacagatggctacaaataaccccagacagtgaagactacaataaatacccaactcttccatgctcacacaccaaagaacatctagtggcatcaaaaacatccaagaaaacatgacctcacaaaaggaactaaataaaccacagggaatcaattctggagaaacagaaatatgtggcttttcagacacataattcaaaatagttgtgctgaagaaactcaaaaaaattcaagatatcacagaaaaggaattcagaattctatcagataaatttaacaaaaagattgaaataattttttaaaaagcaaaaactctggagctgaagaatgcaattagcacactaaagaatgacatcagagtcctttaacaaaagtattgatcaaacagaagaaagaatgagtgaactggaagacagactatttgaaaacacagttagaggagatgtgttagtccatttttacactgctacaaagaaatatctgagactaagtaatttattaaaaaaagaagtttaattgactcacagttccacatggctggggaggcctcaggaaacttgcaatcatgtcagaaggggaagtaaacacatttttcttcacaaggcagcaggagagggaagagtgagtaggaaagggggaaatcccccttataaaaccatcagatctcatgagaacccactcaccatgatctactcacttcccatccagtttctccctagacacgtgaggattatggggattacaattcaagatgagatctggtgggaacacaaagcctaactatatcaggggacaaaagaaaaaagaatacaaaacataaagcatgcctacaggatctagaaaatagcaacaaagaggcaaatctaagagttgttggcattaaaggaggaggcagacaaagataataggaatagaaagtgtattcaaaggaataaaaatggagaacttgccaaacgtagagaaagatatcaatatcaaagtacaggatgattatagaacaccaagcagacttaatccaaagaggattccctgaaggcatttaataatcagaatacaagaggtcaaagataaagaaagaattctaaaagcagcaagagaaaagaaacaaataagatacaatagagcttcaatacatcccgaagccaactttttagtggaaaccttacagtccagaagagactggcatgatatattggaagtgccgaggggaaaacacaaacacataaacaaacaaacaaaaaaaacctttaccctgtagtcgtattagaataatattatatgttgaaaatatccttcaacatgaaggtttatcatattgcctacaaatgtcacttagagaatgaagaatcattttaatattgaaataaaacataataaacatttaaaaaagactttctgggacaaataaaagctgaaggatttcatcaatatcagacctttttctacaggaaatgctaaagggagtgattcaatcagaaagaagaggatattaatgagcaatgtatagtcaccagaaggtacaaaactcactggtaatagtaaatacacagaaatcatagatgacacaaaccaatgaaacacatctcatgctcatggatgggtagaattaagagtgtgaaaatgaccatactgtcaaaataaatctataaattcaatgcaattcccatcaaaataccaccaacatccttcacagaactaggaaaaacaatcctaaaattcatatagaacaaaaaaagagcccacatagccaaagcaagactgagcaaaaagaataaatctggaggcatcacattacctaatttcaaaccagactataagacgatagccaccaaaacagcatggcactggtataaaaataggcacatagaacaatggaacaaaatagagaacccagaaataaacccaaatacttaacagccaactgatctttggcagaccaaacaaaaatataaaatgggaaaaggataccctttacaacaaatgatgctggaataattggctagccacatgtagttgaatgaaactggatcctcatctctcaccttatacaacaatcaactcaagattgattaaggacttaaatctaagacctgaaaccataaaaattatagaagacaacattgaaagactcttctaggtattgtcttaggcaaggatttcatgaccaaaaacccaaaggcaaatgcaataaaaacaaagataaatagctggtatttaaataaactaatgagcttttgcacagcaaaaggaacagtcagcagagtaaacaggcaacccgcagagtgggagaaaacttcacaatctatacatctgacaaaagactaatacccagaatctacaatgaactcaaataaatcagcaagaaaaaaaacaaaatagtccatcaaaaagtgggctaaggacatgaatagacgattctcaaaagaagatatacaaatagccaacaaacatatgaagaaatgctcaacatcaccaatgatcagggaaatgcaaatcaaaaccacaatgcgatactaccttacacctgcaagaatggccataatcgaaaaatcaacaaacagtagatgttggcgtgaatgcagtgatcagggaacactgctggtggaaatgtaaactagtacagccactatggaaaacagcgtgaagactccttaaagagctaaaagtaaaattaccatttgatacagcaatcccaccaccgggtatgtacccagagggaaggaagtcattatacgaaaaagatgctttcacacgcatgtttatagcagcacaattcacaatttaaaaattgtggagccaacccaaatgtccatcaatcaatcagtgaataaagaaactgtgatatatatatgacagaatactactctgccataaaaatgaatgaattaatggcatctgcagcaacctggataagattggagactattattccaagtaaagtaactcaggagtggaaaaccaaacatcgtatgttcttactgatatgtaggagctaagctatgaggatgcaaaggcataagaatgatataatgggctttggtgactttgagggaagagtgggagaggagtaaaggataaaagactacaaatagggtgcagtgtatactgctcaggtgatgggtgcaccaaaacctcacaaatcaccactaaagaacttactcatgtaaccaaacaccacctgtatcttaatagcctatcaaaatataaaaaaaattcagatttatcacattgcctacaaatgtcatttagaaaatggagaaacattttaatattaaaataaaacataacaattaaaaaaaagacttcctcggacaaataaaagctgaaggatttcatcaataccaggcctttcctacaaaaaaaatgctaaagagagtaattgaaacagaaagaaaatgacattagtgagcaatatataatcaccagaaggtataaaactcactggtaatggtcagtacagagaaacgcacagaataatataacaccgtaactatggtgtgtaaactacttttatcctaagtaaaaagactacaaaatgaactaaacaaaaataattaacaactacaacttttcaagactgactatgtctttatgtctttttgtactgactatagtacaaaaagatataaagaaaaaatgaaaagctaaaaagcaggcagatgaagttaagcacagagtttttattagttttccacaagaaaactgtaggtgcatataaacaaattcaatgaagttgcaggataaaaactcagcatacaaaattcagtagtatttctatatactaacaatgaacaatgtgaaaaggaagtaaaaataatcctatttacaatagccacatataaagataaatagttgggaatgaacttaaccaaagaagtgaaagatctctatgatgaaaactataaaaccgtgatgaaagaaatagaagacacccaccccccccaaaaaaaggaaaaagattccatgttcattgattggaagaattattaataatactgttaaaatatttatattaaataaagtaatctagattcaatgcagttcctatcaaaattccaatgacattcttcaaaaataaaataagaatcctaaagtgcatatggaaccacaaaagatccagaatagccaaagctttccgaagcaaaaagaacaaaactggaggaatcacattacctaacttcaaattatactatggaactatagtaattaaaagagcatgtattggcataaaaacggacacataaaggaaacagaatagataacccagaaagaaacctacacacctacagttaactcatttttgacaaagctgccaagaacatacactggggaaaagatcaatagatggtgctgggaaaactggacatccatatgcagaagaaggaaactaaacccctatctctcaccatatacaaaaatcaaatcaagatggatgaagacctaaatctctgacctaaacctatgaagctactacaggaaaatattagggattatctccaggatattggtctggacaaaaatgttttgagcaataccccacaagcacaggcaaccaaagaaaaatttgacaaagggatcacataagttaaaaagcttctgcatagcaaaggatacaaccaagacagtgaggagacaactcccagaatggaagaaaatatttgcaaactacccatctgacaaaggattaataaccagaatacttcaggatctcaaacaaggctatagaaaacatcaaataatccaataaaaaatggagaaacagtctgaatagacatttctcaaaagaagacatagaaatggcaaatgggcttaggaaaaagtgctcaacatcactgatcatcagaaaaatgcacatcaaaactactatgagatattatcccaccctagttaaaaggaattatatccaaaagacagtcaataacacatcctgctgaggatatgaagggaacccctgtacactattgatgggaatataaattagtatgaccactatggaaaacagtttggaggttcttcaaaaaactaaaaatagaactaccatataatctagcacccccaaactgctgggtatatacccaagagaaaggaaatcagtatatcaaagagatgtctgcactcccatgtttgttgcagcactatttataataataactaagattttaaatcaacctatgtgtctgatatggtttggctgtgtcccctcccgaatctcatattgaactgtaactctcataattcccacctgttgtgggagagacctggtgggagataattgaatcatgggggcgctttcccccgtatactgttcttatggtagtgaataagtctcatgagatctgatgattttataataggtttctccttttgcttggctctcatttctctcatgtctgctgccatgtaagacatgcctttcatcttccaccataattgtgaggcctccccagctacatggcactgtgggtccactaaacctctttttctttataaattacccagtctctggtatgtctttatcagcagcatgaaaagagtgtctatcaacagatacatggatatggaaaatgtggtacatatacacaatggagtactactcagtcataaaaaagaatgtgatccattcatttgcaacaacatgaatagaactggagatcaccatgtcaagtgaaataaaccaggcacagaaagaaaaacatcatgtgttatcacttatttgtgggatctaaaaatccaaacaattgaactcatggacatagagagtagaaagatgattaccagaggctcaaaatggaaggaggggcagggaggcagtggggatggttaatgagtacacaaattagttagagagaatgaataagacctactatttgatagcacaacagggtgactatattcaataataacaattgtacatattaagataacaaagagtgcaattggattgtttataactaaaagtataaatgcttaaagggatagataccccattcttcattatgtgcttatttcatgttctgttatcagaatatctcatgtactccataattatatacacctactatgtatgcacaaaaattaagaataaaaaataaaataaaatattttattaacatctcattataaaataatttgaatgttatttataaaaagataatgagatatattataaaaacaattcttaaatgaaaaaacattattatataacagtatcaaaaagcattattacaacaaaggcattattacaataacaataaaattgtctaatattaaaccagaagtgaacaagtggtttaagtattctgcattcattggtaatcaacagacacctcatgtgatgctcattattagaggactgacttcttatatgcctccaatattcataggtaccaaacctacaataatcatatagaagagatatacttggaaagttatgttataaggtagaaaaatatcgaaaaggaaagttttgcctcttaatattttgctggttagaaaaacaagaatctcagatgcaagacttctttaatgaagctaatacatctttgctgtgtatggtattatacagaatgacaataaagtaaaatcttcattagaagattatatgtatttctgttttgattaaatcaataatcctttaaaatatttaaaattactttcactcagtgttattatttcctatagaatgtaatgaaagcaatattttgtaaactgtactcattaaaatcctgtctctaatgttcattgcatgaactcaccatgtaggtaaagataaactctaatgaggtcctttgatgatttctgtagcaaatcccctctggtaccacaggataaattggccttatgcagaaatattctctatattatactgtgggtttcaccacacacagaaatcacatcaaatcagaataaaacataaatgatttacacctctaatagtcttttacctaatacaggtcaacctacatagttttttttcagatgtatcctgaaacatgaataaaaactcatagtgaattaacacagtcaagtatgtacgtatttccctagtttattaaacacattttgaggtcctattatgaactatgcaatagttggggtgctgtgaacacaccaaaaaccaaaacaaaaacgtacgtcccctttctcataacgtttgtaggtttgagagggaagcagacaattaaaagacattaacaataaatatgcaattatgagatgtgcaaatactaaaaggaaaaatccagatggttaaaatgtgggaggggtagaggtaacatttgtgaaaatatttctgattaaaacaaggaagcaggcatacagatatctggtttaccagaaaaaaaaaaatgtgttttccacactcaagtgtctacaggtctcctggagttcagctgatctagtgtgaacttgactgggctcttctacttctggatgagggccagatgcatttgttatttgtctataaaacgagtcaagagctgctccatttgtccctctttagatctgcagctgaggtgtgttctttttagggataatagtagatggaaaaccagaccaaaaaaaagcatattttgtgtctctatttatgccaaaaagactcatatttcattgccaaagcaaattacgtagccaagtctaatattaatatgggagacaagtatttttaatctacaatggcagagcacacagagctatgttgcaaagagtatgggcttactgtccaaacagaaagaaatattagaatcagccattcagtatcctggtacagaaggtggctggtcttctgttcagagtaaagactattttttttttgagtgagatgtgaagctattgcagaattttgggcaaagagggacatcatttgatttgaatgttgaaaaaaattacttcagtctttttttgcaaatatattgtcatgcagtaggtgaaaaactgggatgcttatattaacccaagtgataagcagacatatataggaccagggaagtaataatacatatgcttaaaggtgaactgaaaatgtatttctctactctactacatagtcatcatactatggcggcatagacttatgtaaccacgatagacgttcccagtttaaaatgagaaaatcaggaggcacaccacagtcattggtcaatagttatttgaaaattcatcgggttatttattagattaagactcagttattctctggggcttttgaatctgcctactagatttcttgtttcaccatctaaatcatccttttcttttcatcgggggtagtatatatatatttctctgagaagatttttagccttctttgttttgcttgtagaaggttgaaggacaaaaatctttctttttaactatccttttaagtataagtttatgaactccgttaaacaaaacttttaaagctttggaatatgtgtcaatttataaattattccatagacaagagtcacacccacaatctcatcaagataatctcacatctatttggtctccctatggtactgctgtagggcagtccttaagattcttagaaaaccatttgtttaatagagaagacctttgaggaataacctcatgctctctggaagaatttttgtctgtctgaaaggttacataagacctcatcttagatcttttctaaggtcttgacataagatcttgcagttctaccttggattgaatcttttcctggaagctatttcttaaatgaatggtttgccatctggagaggttggcaaaagatgcagttttaatttaaaactttgcaatccttgactacttaaatatttaaccatcaattctttagctcctatctcttctcttttatttgatttaaatgcagagagaaaaggccaggtggcatcttcaaaaattttgcctggagatttccttcactagatcattgagttcactgaggtgtttacttttttgcaaattaactcaggcgagagtattgtcaaatttagtggtactgtatgatgtgtcacctctcttctagttcccactgtcatttcccttaatctcctttaagctttcactgacagatttctccaggccttgcaggcttcattaagactattcctagctccctttaggctgtcattaacagaaaccttaaggctcaaagaaatgttgtatattttaggtttgggttatggcagatcctacaagcggttccattatcagctccaattatttacaaacgcatattcaactactccaaatgttcagtttaaaacaatcattttattatgcttacaggtactctggggcaggaattcagaagataagcaaaaagaattttcatctgctcatgagagcagaagcttcactggagaggcttcaatttctgtgcaaaggaatcaagtggtgtcaagtggtggcatgctcactcacacatctgttggcagatgctggcagaaggcaagatttctattggctttgtcctccagaccagtacttcacataccctgtccttcctcggagcatagaaaccttggacttcttacattaatattcatggcttcaaagatctcaactcttccttaaatgaacgagcctcagatgtcatatcacgtgatatctgccaaaattaaaagtctaccacccagctccaaatgaagaaatgcagacactcatattttagttagaataacttcaaagttacattgtaagaatagcatgtgggttggagatattatttgtagtcatctatggagcatacaatccgctacttctatgcagctcaaacctatgatttcctataaagcctacatcatccaagcaaaagggcagcagaaattattgtccactaaatatctgttttagtgagaatgttttccttttttcgaagtgttaattttgttgttaactgtaattgatttgatgttacaaaagtataaagcgtattccacatagaataacaaacacgagaggggaaaatggcagagaggaggcagaactaacttgcagctcacaaatggaaagacagagcagcatgtggagacccacctcatgaacttttgctccaagaactaccgcaggaacataccaggaaagccgagagaatgcacagacccttgaaggaggtggattaccgctgcagggtccatggaacagctgaggaactgtgagtcggcttgctttctcagctgggaggcttgaagcctggggcaatttctcagccctgctcaccagctgcttggaaataaacttggtgctgttagggggatatggtgtgggagtaaggctggccttttgggctgcaagctcttttaggagctggtgaggcctgcggcagctggcgttcccccacttccctggaaacccgggtgatgcagcagaggcagtcgcaatcccccagggaacataactccattggcctgaaaaaccacaccccccatcccgcaaggcagccacagcaagccccacccacgggcagtctgagctcagacatgcctaaccctgcccccacctgatggtctttctctacccaccctggtagctgaagaaaagggacataatccctctatggccctgcccacttcatgagaaacctgaatacttatccaaacgtgaccctaggacaagctcgtaccctccctacttaagtacagctgatacactcttgaaagcgccacctcctggctggaggccaaccaacataaaaccagcgcactcaacaaaaatacaaccaagaaccctcacagagtccacttcactcctctgctgcctccaccagagcaggtgctggtatccacggctgaaagacctgaagatggatcacatcacaggactgtttgtagacactttccagtatcatcctggagcctgatagcccctgctggatggctagatccaaaatacaaataacgatcactgaagtctggctctcaggaagccccatccataggggaaatgggagagcaccacatcaagggagcaccccatgggacaaaataatcgaacagcagctctcgagtcccagaatttccttctggcatagtctacccaaatgagaaggaacagaaaaacaattctggcaatctgacaaaacaaggttctttaacacccctaaaagatcccactagctcaccatcaatagatccaaaccaagatgaaatctctgaattgtcagaaaaagaattcagaaggtggactattatgccaatcacagagtcaccatgctatatacaaaatccttggctgataattattttgtttaaggaggctaaagttagggccccaatccctcctagcttgtagggcttctgctgttagtctgataggttttcctttataggttacctgatgcttttgcctcaaagctcttaagattattttcttcggcttgactttggataacccgacgattatgtgcctaggtgatgatctttttatggtgaatttaccagatgttctttgaccctcttgttttgaatgtttaagtctctagccaggccaggaacattttcctcaatcataccatcaaatatgctttccgaactttcggatttctctctttcctcaggaacaccaattgtttttaggttttgtcgtttaacataatcccaaacttcttggaggcattgtctattttttaaaattcttttttctttgtcttcattggattgggttaattccaaagccttgtctttgagctttgaagttctttcttctacttgttctcttctattgctgagactttccagtgcattttgcaattctctgtgtcctttattttcagaagttatgcttgttttttatttatgctatctactggagatttttccattaatatcctgctcctgaatgatcattggctcaacaatgaaatcaagatggaaattaaataattcattgaactgaatgatgatattgacacaacctatcaaaacctctgggattcgccagtggtggtgctaagaagaaagttcatagccttaaatgcctatatcaaatagtctgaaaaagcacaaatagaaaatctaaggtcacacctcaaggaactacagaaacaagaacaaaccaaacccaaacccagcagaagaaaagaaataacaacgatcagaacagaactaaaggaaattgaaacaaagaaaaaatacaaaaaataaatgaaacaaaaaactggttatttgaaaagataaataaaattgatagaccattagtgagataaacccagaaaagaagataaaagatccaaataagctcaattagaaaaaaaatgggagatattacaacctataccacagaaatacaaaagatcattcatggctactatgaacaccccaacatgcataaactagaaaacttagagcagatggataaattcctggaaatatacaacactcctagattgaatcaggaagaaacagaaactctgaacagaccaataacaagtagtgagatttaaactgtaattaaagttaccaacaacaacaacaacaacaaaaccccaggagcagaatgattcacagctgaattctatcagatattcaaaaaacacttggtgccaatgctattgacactattccaaaagatatagaaagaaggaatcctccctaaatcatcctatgaagacagtaccagtttaacaccaaaaccaggaaaggacttcacaaataaagaaaagtatagaacaatattcctgatgaacagggatgcaaaaatcctcaataaaatgctagctatccaaatctaacagcatatcaaaaagataatccaccatgatcaattaggtttcaaacctacttgattcagggatagtttgacatctgcaagtcaataattatgaaacaccactcaatgagaattttaaaaaaatacctcacatgattatttcatttgaaaatgcatttctcaaaatccagcatccgtttatggttaaaaccttcagcaaaattggcacagaagggacataccttaaggtaataaatgccatctatgacaaaaccacagctcacattatactgaatgggggaaagttgaaagtattccccctgagaactggaaaaaagaaggatgcccactttcaccatctctgttcaacatagtactggaagtcctagccagagaagtcagacaagagaaggaaataaaaggcctccaaatcagctaagaggaaatccaactgtcgctatttgctgatgacatgattgtataaccagaaaaccctgaagactcctccagaaagctcctagaactggtaaatgaattaagcaaagtgtcaaaattaattaatgtgcaaaattaatgtacacaaatcagtagccctgctatataccaacagtgaccaaactgagaatctaattaagaactcaatccctttcacaatagctgcaaaataaataaaataaataaaataaaatacttaggaatacacttaaccaagaaagtgaaacatctctacaaggaaaactacaaaacactgctgaaagatatcatagactacacaaacaaatggaaacatatcccatgctcatggatgggtagaatcaagaatatgaaaatgaccatactgctgaaagcaatctacaaactcaatgcaattcccatcaaaatactaccatcattgttcacagaattagaaaaaaaaatcctaaaattcatatggaacaaaaaagagctcacatagccaaagcaaggctaagcaaaaagaagaaatctggaggcattacattaatttacttcaaacattactatacagccatagtcaccaaaacagcatgatactggtataaaaatagggatatcgactaagggaacagaatagagagcccaaaaataatgccaaatactcatggtcaactgatccttgacaaaacaaacaaaaatataaagtaggggaaaggacaccctattcaacaaattgtgctgggatagttggcaagccacaggtagaataataatactggatcttcatctctcactttacacaaaaatcaattcaagatggatcaaagacttaaatctaagacctgaaagcataaaaattctagaagataacattagaaaaacccttctacacattggtttaggcaaagtcttcatgaacaagaacccaaaagcaaatgcaacagaaacaaaaataaatagacgggacttaattaaactaaaaagcttctacacaacaaaagaaataatcagcacagtaaacagacaactcatagagtgggagaaaatctttgcaatctatagatggacttgcaatctatacatgcactatacatgcaacaaaggactaatatccagaatctacaatgaactcaaacaaatcaacaagtaaaaacaaatcattccaccaaaaagtgggttaaggacatgaatagacaattctccaaagaaaatatacaaatggacaacaaacatattaaaacatgctcaatgtcactaatgattgtggaaatgcaaatcaaaatcacaatgaattacaatcttactattgaaagaatggccataataaaaaaataatacatgttggcatggatgcggtgacaagggaacagttttacactgttgatgggaagggaaactagtacaatcactacagaaaacagtgtgaagattccttaaagaactaaaagtagatctaccatttaatccagcagtcccactactggatatctacctagaggaaaagaagtcattatacaaaaaagatacttgtacacgcatgtttatagcagcacaatttgcaattgcaaaaatatggaacaagcacaaaagcccatcagtcaagaagtggataaagagaatatggtaatatatatttatatatacatacacacaccatgtatatatacacaccatggaatactggtcagccgtaaaaaataatgaaataatggcatttgcagcaacttggatacagttggagacattattctaagtgaagtaacttgggaatgaaaaaaacattgttctcagtcataagtgggagctaagctatgaagatacaaaggcctaagaatgatacaatggactttggggacttcggggaaagggtgggaggcaggtgagaaataaaataccacacattggctaaagtctacactacttgggtgatgggtgcaccaaaatctcagaaatcaccactaaagaactagttcatgtaactaaacactgcctgttcctcgaacaccaattacaatataaaaaattttacaaatgcatgaagggctgcaaaaaaagaataacaaacaccagatgcattttcagtattaatttataaattaattatgtctttggtactattgctcaaaataaattttttggtcttattggacatgatgattaattcaatgtgtcaatttgactgggataaggagtacccagacatttggtggagcattatttttgttgtgtctgttagggtgcctctgaatgagattaatatttgaatcccattgactgagtagtgcggataggcctcatgcagtcattaaaaacctgaaaggaacacaaagtctgaatgaaaggtaacattttgacccctctgcttgagcttgaacattggtgttctcctgtccttaaatagaacttacaccaatgcctcaatgcctctcctgggtttctagcttgctgactatagactttgggactttgcagcctccatagtcatgtgacccaattccttatgatcactcaatcagtctcttttattatatatatatctctcccccttagaaatttataaagactgtcatgtagagagacagtcttttaccttttctgtttctttcaggaaccctgactaatgaagtagaattctgtaattctgaaaagaaaagtgacattgcttaaaaagtgaattatactaactgtgtttttaaagtcatgaagaaaaattatcatatttttaattgtcttatgggaagtaaaactcaaccttacataatttgaaaaatattttattcctgttaattgtgaaacaactggctttctttttttttaagctagagtagactaaaattgatttttttagtatagaaaataaagtggcattcctttttcaggtttgtatcttgggaatgatacacagaataatttaagggaaaaggttggaaatgtgtatgatttcatttctgttgctctcattttgtaagagaagattatttcatgctgttactgcaagtttacttactcagttcctgagtactaataatagctcaaaatttctagtatatgattaccaaatgagattttaccgaaactaaataagactgcaatacatagatgaagagcgaaattttgacaatgttaatgttctttttaaatcaatgcaataaatacaaagtgcagcaatgagaagaaattaaatatttgttttacttagtaaatctttatgtgttatctatgtatcagtcactttgttaagctctttacaaatttagcattgtttagttatcataaccctgaactgcaaatatttttagtattgtctccatttgaaaatcagaaaatgaaatgttgacaatgtattaaattgtcccaaacaaaggtatcaagtagcatgtgattataaatggttattatttattatatggtagtcttggtaaattgctagtttaacttttgtatttaacaactggaagaggacttttaaaatcctgattataatacccattttatgtagcattttagtagattttcattgctctaaccatagtgaccaaaatctttatcctggatgacaaggtctaggtgctgtttctgttcaattcaccagcttcattttctgttttcccacctctcttggcctcatatcctgtcttcccacatctaatgattctgggtacctcactcttttgtcatgttttggtccatcatacccaatacattatttagtcctcaaatcaaataacaacaaatgaattagttaatgaagaataaataaatgaagcagctcacagaataaagaaaccatattttaaagagaaatcagtgagcctccagcactcactaggaagatcatacctaattatttggttagaatgtacctctccaggccagtcatagtggctcatgcctgtcatctcagcaacttgggaggttgagacatgaggattgcttgaggccaggagtttgagaatagcctgagcaacacagttagacaccatctctataaaaaaattaaattaaattaaattagacaggcatgatggttaatctgtagtcatcctagctactggggtggctgaggaggaggaatacttgagcccaggagttcaaggtcacagtaagctatgaccacaacactgcactgcagccttggtgacagagcagaatcctgtctcttgaaaaagaaagaaatttacctctccataagaacttattaaaccctcacaaatgtgcaagtatacacacaaaaacattctgtttcatatgtccctaaattatttttcaaatccaaaacatgtttgttactgagattacatgcttgaatagaattttttagaaagaaaaccttcatatgtcttcattatactatgaccaatagtatagtcaagaaaggtcataaaagtctccgagcctgaaattatttttccaattaactgtataaaatgttaaagttctgggtatagataactttttctcaataatggtagcaaagattataataacacagagtcgttgaatttagaactatggttcaagttctacccgtccaacttagtggcagtatgactttaggagtaaacaaaatcttatctaaaaacaagcaattaataaatatcactttaaatcaatattattatgattgttcaaataacagaatttaaacatactaattatatacttatatgtttaaattatttcagtttacaaggatacacatttaatacttctccaaattattatctagcataatccaaaagagcatgctttaaacggtactcgcccaactcacaaaaatacaattattagtgatgctcacctagagtgaaactatttactcatttgcccacagctagcaaggcttgatagaatgaaatgaaaatactgagaaccagagcaaatttttagaaggctccaaaaagatatgttaactataaaagtaaatatacatatttgcagtttctcaagaccataaaccatagctgataatgtttaaattgttttcgttaatcaattctcttatgaagatgagaggcatctgatgaattttgcttaaaattcgtaactaatctttttcaagtttaatgatgtataaaagttttaaaagtctattagtgttgaagaattaatgtgagtgtttatggtagaatcagcatgatttgtctagtgaaaattctgggttgatcagacggaaccttctaaaaatgtacaaatcttttgggactgtttggtaaatggatgtgcctattatcaagcactgtttcattataagagtaaatgtgtttcatccacaaagggccaatattgtgatatgtgaagaaacataccatcgtggtatgtggagaaattgtaaagtgtattgataatgttgctgtataataccttgtaccaattcataaataaaatattaatgagtacaaagggcattatattgcagttcttataagtagtttttattttttcttttgtttctcgtaacaactaaaggaatagttttactttgagatccattttatagttaagaagttcgggctgatataaatgacttttccaaactattcaaggtagaatgtggaaaaccaagaaatatcagctatggtttatggtcttgagaaactgcaaatatgtatatttacttttatagttaacatatctttttggagccttctaaaaatttgctctggttctcagtattttcatttcattctatcaagccttgctagctgtgggcaaatgagtaaatagtttcactctaggtgagcatcactaataattgtatttttgtgagttgggcgagtaccgtttaaagcatgctcttttggattatgctagataataatttggagaagtattaaatgtgtatccttgtaaactgaaataatttaaacatataagtatataattagtatgtttaaattctgttatttgaacaatcataataatattgatttaaagtgatatttattaattgcttgtttttagataagattttgtttactcctaaagtcatactgccactaagttggacgggtagaacttgaaccatagttctaaattcaacgactctgtgttattataatctttgctaccattattgagaaaaggttatctatacccagaactttaacattttatacagttaattggaaaaataatttcaggctcggagacttttatgacctttcttgactatactattggtcatagtataattttgtaaattataacctcattttcttttcaatatattattcttctctttacactatcatcgcatactcttttgtctcctactgtttctttctctacgtttttattgattttgctgttttacctgacagagccatcaatgtactcatcccaggaggttgccttatactagggcatttaatcaaattgtgatacttgacattaataattatttagcacctgagtttgtttaggaatctagtaactttccagaatgtatacagagtttggctccctaaggagctttttaaaatatgtttattggctgcataaatgtcttcttctgagaagtatctgttcctattctttgcccactttttgatgggcctcattattaaattttttaatgagaaagggctaagttactttcaaagttagcattgttatctcactttacagttgagaaaactggagtacagagaatttaactacttggccaaaagttacaacattgccaggtggcagactcaggattcatagcctggctgtttggttccagactctacacacaatctactctgtcccactgcttaataagatgcctctcccagcatagctcagataaaaggaaagtggcaggcaaaagtagcatatatttcagcaagaggaaaattattaaatgttgggtggaattaactgtctctaatatcactgagctgaaaattaaataatggtagatattttaaagtcaacaggattaaaaaaattaataattgctaaaacatcactgtagaatttagagataatcttccaaagacataacattaagtaatatatccttaaaaatatatatcttccccattatcttataaagctgtgtccaccttaattaagaaaaaataatgtgatacaaacaactgttttttctctaatagttctcctccttaaaatgtactcaccatgagcctagatctgaaagtctcattagaattgttatggatatccaatcccatcaaacacttttcatttgtcacagttctctcggtaggtttttacacttagtcaatatttgctcattctttcgagatttcctgatcttgtctcaataggtacataattcctgctatacttgatcatgtttgttcagaatgggcctagagtagaagttagatagtagagactagatagtcgaagtttcatttctattctgtttttgtttgtttgtttaatggagccatgacgtggtctcattactaatctccacgaaacagcaatttatttaatagcgggatgataatatttgcaacagcagtattcaaagtgaagagcagaatatggaattagcccatgcagatggcatatatatttttaagattgacataattgccacagacaatcctgttagggtcatcaggtagcctagtactggtgcagccaagtgcttggttcccttttccagtgcccagcaccccatgcacccattccttaagctggggtacttctactggcatttgcatgttagtcttactaagattatttagcattggtctccaaacttgactgtgacattttcaatcgatactttgattacataacttagccacatgtcacatcatcaagtgaaatataaatgtgaatgtcgttttcgctgtggaaacgaaattgaataccatagaatgactacgaaattcaggtattttaaaaatacatttttataaaaggcataggcaatgaaagcataaagattgaaaataaattgtaaatgtttgaaagaatcctgccttcggattattgtcacattgatgttttcaggctattttaaagaaactgaaacttttgaatatatagaaaatgcaagactagtgaggattttggaaacaatatgagtttgaactccaataaattgagtctatattttaaaaaggagttttatttagacaattaaatatctctgaattagagaagatactgatattacgtttttcttttaaaagtagcagctggaccccttccttatatcttatagaaaaattaactcaagatggattaaagattttaaagcccaaaaccatagaaacctttgaagaaaacctaggcaataccgttcaggacataggcatgggcaaagacttcatgacaaaaacaccaaaagcaactgcaacaaaagcgaaaattaacaaacaggatctaattaaactaaagagcttctgcacagcaaaggaaactattatcagcgtgaacaggcaacctacagaatgggagaaaagttctgcaatctacccatctgacaaaggtataatatccaggatctacaaggaacttaaacaaatccaaaagaaaaaaaaacaaacagccccatcaaaaagtaggcaaaagataggaacagatacttctcaaaagaagacatttatgcagccaataaacatattttaaaaagcttgacatcactgatcactagagaaatgcaaatcaaaaccaaaatgtgataccatctcacgccagtcagaatggcgatcttggcaaggctgtggagaaataggaacacttttatactgttggtaggaatgtaaattagttcaaccattgtggaagacagtgtggcaattcctcaagaatctagaaccagaaataccatttgacacagcaatcccattactgggtaaatacccaaaggaatgtaaatcattctactataaagaaacatgaaaatgtatgtttattgccgcactgtttacaatagcaaagacatggaaccaaccgaaaagtccatcaacgatatactggataaagaaaatgtggtacatatacaccatggaatactatgcagccatataaaggaatgaaatcatgtcctttgcagggacacggatgaagctggaagccatcatccgcagcaaactaacacagaaacagaaaacaaaacgctgcatgttctcactcacgagtgggagttgaacaataagaacacatggacacagggaggggaacaacacacaccgaggccagtagggtggtgggggttgaggggagggagagcattaagacaaatagccaatgtgtgcagggcttaaaacctagatgatagggtgataggtgcagcaaaccaccatggcacgtgtatacctatgtaacaaacctacatgttctgcacatgtatcctggaagttaaagtaaaataaaaaattaataataataacaactttgcttttagcgttcaacatacaatattttatgtccaagtatggatatcaagcattaatatccaaaatactatatatgtaaattttagattaaaataaaattaatacaaccaaatgttaagtttatattattttatatgattcattgctttaactttcctaattactttagctatgaaatcttcttctctttgttattaatttcgtaataccagaagatttctgtgcaacatgagtataagtaaaattcaggcaatttttttataaactcaaggaatatgagagttttaaaaatctgttcatgcgtacaattttatgagaactgaccctgaagagaaagttctaaatgtacagacttttcttgaggtgaaaaggattgtgttaacactaatgactgcctgtactgtttgccccatgagaaaagctatccagtatgattgtttttaaagatagacaaagccaggtgaatttaatgatacatgtattctattgtcactagtggttagaatggacaatttgcatatagaaatagtgtcatacagtacaaaaatttaaaaacaaaacaaatattcaaaacataactaagaatataaaatcaccttatcactccctggtcctgcatagctatttgttgacatttatattaaagccttgagctattttaatgtattctcaagtttaggaaattttatgtgaatttgtatcaaattgacaattttactaatctctgtgtatttactttttgtaaattaaatgaattttacagcacccttgattcatcagctgcacagatttagcaggtttatggtgaataattgcatatattttttaacactgagtttctatcaaaaagaaaacaatagaatttgcaaacaaatgcatgaacaatttgttagtctatataactctcccacatttggaatagtccttcctgtataagtggaagtaaaaagctagctttccattcataattacgattagaattaggcatgctttaattgtgttgatgctctcttataccagttaataaatctctctctcatatcaaattgatttaataaaaatatcctgtgctatgttttttctcctgaatggattacttgtagctatacttaaaaaaatctttctaatttacgagacagctatatttgtcacaattctctagagagacagaagtggtagaatatatacagatagatatagatcagaaagaatttattaggggaattggctcacataataatggaggctgagaagttccctcccagcttctgcaagctcgaggccctaaaatattacagtagtgtggctcattccaagtcccaaagcctcagaaccagggaaggcaaagatgtcactctcagctggaggctgaaggcctgaaaacccagagggtctcaggtgtaagtttcagaatccaaaaaccaaaaatcctagagttttgatgtccaaggacaggaaaataagggtgtcccagctctacaagagagaagtcagggtgatagaagggggagcgagagcgggtgatgggggatggggagagaggaagaaggtagacaaggaaacagggacaggagacagggaggaaaatctcctttccaatgactttttgttctatctctgttcttcaatattaattttgacaatattttggaaaactctaaataaattttggtgggatagaccacactttaacctctatagagacttagtaactggcttaatcgaatcagcttaattatattcattggtttcaggaaagagtctcacagattttaagccactgaaaaccaggctaaggaattatgcttgcttggctgctctgagagtgaagctctctgcatctgaacagcaattctgtgaggagggaggttgaccttcctatgtgactccaagaagagcacctgatgctccctgaaagaaatgcatggtctcccagaaggctgggcctgagagaaataacagaaaatgtactaggcagaggctggatctttggtgcccttggtgaggagacttaggtcaaacattgccttctgctttaacttttgggttagcaaaatgtaccaaactttttttttccaacgttcaaaacagtttgaattggatttttttagtcactgggagctcacatttttattacagatagataaacacaaaaatacaatgtctcctgttctctcacgttgaaagaaagctacctcctcaggttgaattggaaatgacattgagttataagtacttcttaaagttgttgccatataaagacttctatctatacttcatgccaaaaacaaattaaaacaaatacacacacacacaccccaaaataaacctaatgtttcttttccgtacaacagcctcctttttcttatttatttattttgagacaggatctcacactgtcgtccaggctggagtgcagtggtggtgtgatcatgcctcactgcagccttgatctcctgggctcaataatcctcttgcctcagcctcctaagtagctgagactatagccaagcaccactaagccaggataattttaaaattgttttgtagagaggagatctcactgtgttgcacaggctgatctcaaactccttgggctcaagtgatcctcctgccgtggcttcccaaagtgctgggattacaggctacagacatgagccaccgtgccaggcctgctttctttttacttaattgaatacacattttgaattaacaggatttcttcctcacataggctgataggaatctcaggatcaaattaactgcataccactgttgactacagaatagctgatgatattttcatcagtgaattcatttttgccttcaacttgctataatacccttatttatcgtcatttttacttatccgtattttaaattcaatttcattctgtgcatttgtgttatgtaacttaactattcgtgaaactgaatttggatagcactaagtaaataaagcaaacaccaaatcaccacagaaagtaacacaaaaaattgtcaatctcttaggctgctgtggactgtaaatgatgaaaatataactcaattatttttggaaataagaaaaacacagtgttttcctcaggaaatccaacactggggtaaatttcaggttggtttaataatcagtttagcaatattttcaagtgtttaaattctccatatatcttaattgtctaatccttggattggtttcactctcatccacgtagcaagattgctgcaacaattctggttatcttgtcctaacatgacagattcagacaaagagacagaacagtccttcctgctggctatttcactggagaaataatacattttttttcagaagctgcctcctgtttcactaggcaggatgttttaacatttgcttttctaaaacagcccgaagcaagaataatttaattattacagttttcctaatatttatgtgtgactctgtagacatgacagcaatagtcacaacgcccaacaccatgcatttctcactttttaaatgtattattattgttgttgtttgtccacctgctgaacttcctctctagatgttaagaattgtttgccctgaaaataggaatccccattaaagtagagaaactcttaaaactattacctttacattttagactgaatctttaatgtactccaagtaaccattcattcaaataaccatttgaaaacctacaatgtgccaagcactgtttattctttcaatcagtatgaaattataaatgatagttacgtcttcaagaagattctaatgctttttaattaaatgttcaattgaatgaatacttttgagcaccaaatttatgtcagaaactctgttaaaaattggagaatgactatttaacaaaacaagtctggcccttgagaaatagatgtaaattctagtttcttacaaaaattatcttaaattctttgctaccttttataaaattagggtaaattatgctaaaaaagctacctctgatgacagtggtatgaaagttagactagatagaaatgaaggtggagttgagaatatagtttaaaaagtaaatgtaatagattagagactatgatgctgatctaaaataataacaataatagcgtaaatatgtatatcaaatgtttgcaagagagaaaatttgatcataagaaaatagcaaacccaggttaatgacaggaaggagccaaatatttatgtggggttaagaggaagatacttttagttatatgaaaacaggtattttgtttccatcacatgtcccatgaggcttccctacatccaaattgtgtaactgatctctactgggtgaaaactgctttccagtactcgtagctgtttgagatttcccagtacttggagtcacctgtaattgtgcataacttgattattttatgtgaaaaaagaaccttagactctaacaagtctgaagtagggtcactaaggtcttgaaggagggatgttaacatacctggtgacagcaagttcaagaggttcttctgaaccttttctgaaggagagcatctgctcatttaccaacagattgtttccaaggcacattttagggaggtatttactccacctgggatatcaatctaccctttgacactttgactctgctattaatagatgaaaccaaaacgcagtggaaaaaatgagcctttctgggcttcgaaaagacgaacaaagagcctgtttccaggaatttaagtaggaaaaatatgcagataatcttacaaggatagtaaggttcaggaaagtgacagggattaattgattgtgttttgattgtaagattgctggccaccatgaggtcacaatgtaattaaatgtttttaatccactgtgttgtattaaaaaaaacagaaaaacgttgaaaataattgacaaagatgaggttgaggtatattagcagatttgtttttcctattagaaaaatatgtgaatttctattgtgtaaaaattctaccctctatggtttttgttcattttactactttgtgtctactacatatgggccaccatatgtcacacaaatttataatgattttgacaaataaacagtcttacatttaaccagtgagtcactgagtcaaacactatggccatgtcacatatcttctcctcatgcaacagtctcacttcactacaacaaacaaaactaaagaaacagaagttctacatatactgggggaaaaatcaggctgtatgttacacacacaatttattttcagcaagaaactatttgaccatttcgtacctataaaatgtccagtgggagaaattacattattgaccctgaggcacttatttttaaatggaagagtgagtttacctttctaaccattcatcaaagaggagtgagtggaactttaaaagaaatacatttccaaagaaaacttgaagattgaagttccactcatcctgcactatgatgttaaaataaaaatagccttgcctgtgtgtagtttgccttagatacaagttccagtaaactactttggcaaggccatcatcataaacagtgacagtaggaaatatgattcttcatcttctctccagattattttgctgcaaaagtctagtgtcatctaaacacatatttcatatcttggatgaggaatgaattggaaaggtgtctctcttctaccatatcagaacctctttaaagtaacgacagaaagagagacagagagaggagggagagagagagagagaggagagaggtagcaaaatactaagtttgagaggagaaagctaaagagtaaatgaaaaggcagagaattgagttatctaaagcatacatatagaaaaatttataacttttgatggatcttatttttaaatattattaaatgataggaaatgaccagtgttaaaaatctggaagttaaaaaactacaacagaaaattctcatgaatcacaagtgattgaaaggagacggatagaattctaagttttattagttattgaatttgtagtcacattgccagaaatttccgattttcgtaagtgatctttatgcataacagaaatactaattgttgtcattttccccctttaaacaagtaaaatagttcaattatctctattcattgtctctcctacttctttctcatttttttctacttattgattgtgctctccttctatttcttcctgctctgattgcattatttttctttccaataaacttaagaactggcattgaatttgggcaatgaggaaacctagaactcgatggaatagtaaggttattatgacaaacttacagctaaaactgtcgtgatgtatactaatatggttaattattaagagatttaaaggttggggtgatgtaatcttaaagttggagaagttatagtctagttacagtattgtactgtaaattctaaattatacaattaaatatatcagtaaataaaaaatgctctttatattgaaatgagaaaatgatatgcatcaactgcactagtatattcaactgcatgccataaatatttgaaaaagaataaatattgagattctgttggcagaggcccggtttttgacattttgtttaagaatttacacttgcccattagtatttgaaataatacactaaacctatgtaatgagtagaaggtgggcagaaaaatgagagaaagatggtacctatttctgatcagctgttttaaaagagtaagtgaattgcaagctacttagcagagtaacttttttttttttttttttttgagacggagtcttgctctgtcgcccaggctggagtgcagtggcgccatctccgctcactgcaagctccgccgcctcccgggttcacaccattctcctgcctcagcctcctggagtagctgggactacaggcgccagattatcagagtaacattttaccattgagtagtaagtcatataacagatacagtgcataaagataaaacatttataatcataaatcccaccgattttcctaattaataatccatcatcactggcttcattataatgtataatatggatgaaaccaaaaagatatggcttaattccagctttaaactgaaaacaatcttctattgctttgaattttcacaaccctggagctaatgaggtgttacagagcagtagccttcaatggcagaagaagaacgaacaagtgtttcactgtttttacagtccctgtaaaagatatagatatgttgagccattgtttaggttaatccatcctgtctttgttgtctgaggagactgcccattgacttattaaaactacagcagttctcttgcttcagtccttttcaagaattgttttctgtagcctttgctttgattctgtgggttgtcccattatctttccaataaattaccttattttgctaaaggtagcctatttctctagcttgcaaacaaataattcaaaaaagacatagatactgtttatttgttatcattgatctaaggactgccagaagagttgctaccagagttttgtataagcaatttgcttgggaaaatcaatgcaatgctttgcctccagcataacatcagattaaaaagaaagctgctgagaaagtaaaagatctttttattgcctctaacactgtgatgataaacaatcaattttcttatcaaatgattatataggacagtatatataaatctattattttgatatgaattaatttgtagaatacattaagccacaactacaaatacaatttaagagttcttagaatataaaaatgaatatttcacaattgtacttaagaccttctgctctctttttaaacctccaacatctccttgtctgtcttcattcctgccaaacaactttgtttcttatctgataatgaaaatagatttgataagaaggaaattcttatcagctcacattagcacttttacccttctacccacggttgtcctcatgttctatactttcttttctgctgctttggcttggcagtccatatgcctcttctcagaggttagatcacagacactctcatttcctgaaggtcactgatccggattcatttatttatggcgacagcttcaacctccctctctctactgctgtttctcagcagtaggcaaaaatgtcgttatttcagccatcttaaaatcactttcactggacttaattttcctactaatcactaacccatttattcacatcccttacagaaagctcttccaaaggagtttcctttacttgctgttcacaatagcttttcttcagttctcatcagaaccaactgtgtttaggcttttgaccaatgcatcacttcactaacgccgttcttgtcaatatcaccaaggatccttgctttttaatatgtaatggtaaagtcttagtcctcttcatctcatcacagaatttaacacacattattagtctctcctcatttgtatatttgcttcacttgcctcataaataccactgtcctccttcaccagaaacccattttcagtgactctttcttagtttcatctcaattctttcacctctttacactgaagggttccaggcctgagtccttgaatcctttatctttccacatacactcttttgtgttcccaacccgcttcattgtttttaaatataatctaaacctgtatgatttctaaacgtatacttcttgcctgtggctatattcacattgactacagaaaataaatcaagttacagaattaaggtgaattttattcattaatcttactggggagaagagactgaagcctgagtctcaggagcagccctttagacagattcaatcagtatttcagcccacttcttatatacccatggtggaggttcagtacttgcaaaatcacatcgcacctgcttacaagttacattaaagtagaatcacattgtggtttgggtgtaagagtacatttagttctagattacagaagcataataactaaccctgtcagacattattaatcttatgtgtaagaaaaggaaaaggctaaggtcatttctcttttctttttttttttttttttttttttttttgagatggcgtcttgctctgtcgcctcggctggagtgcagtggtgcaatctcggctcactgcaacctccgcctcccaggttcacgcgattctcccgccacagcctcctgagtagctgggattacagatgtgcgccaccacgcccggttattttttgtatttttagtagagatggggttttgccatgttggtcaggctgctctcgatctcctgacctcatgatccacctgcctggacctcccaaagtgctgggattacaggcgtgagccactgcgtccagcctaggtcatttatcttttgaagaatgtagtggctcaggcaagagacgtaggggaccatgttctgtattctattttgtcttcaaagcatctttctggagacctatatgtcatcatagagccagaggcattgtgaaattatgctggcaagcagaaatgagtaaacacggctttttatgtttgctgctttgttttacactttactccagattggcatttccaagcttcttgtgcgtttgcactctgcagtataaaagacatcttaacctaaaatgacaaaactgtacttaggaacttttcccaaaatctgcttgcttctaatgcagccttttgtatctcatttaatagcaactttttttcttagtcttcaaaatttgggagtcacaattgactgttatctcctctcacaccccatatttgatattaaattgataatacatttggaagttgtctgcgtattttttttttttttacctcatctactgtaaactaggtccaggacacctaaaccactgcatgatttcagtagtctcctaagtactctctctacttctagctattcctctttttttttttctcaacacaaccaccatagttagcctgttaagacctgtgtcacatacacagaagttggtctcctcaataagcagattctcagatggggtttaatccacagtaggtttatcaaggtgtttcttttcctttagcagctatggatggaagaagaaagaagcaacataggcagaaggagaagttaaagttgaaagaagacccaactgcagacacagccaatctcactgggtgctctggagctgtaaaaaccttttagggctatctcaaagttttccaagatgagcttagaggcccattcttgtgggatgcaccctgaaaagggcatgatattgggcaagctctctgcagctgtggcaaactctgaattacctggaaggtaaaggctgtctgcctgccatcactatcctggtagctgaggcaacaagattctcatcaaagtgtgagatgacctgtatgtcacaatgtctacaccatctcatcatgtcccttctcagcttcaaactaaggacttttcattgctttcaaaattggagccataaagttcacaatgactttcaatgccctacaacatctagaccttcatttaacctcttaaaattccccatttcactcaacactactccagcatttgttgtcctgtgtgttcttggtcaaatatgtgaaacacactgccaccttctgggctatgggcttcctctgccctcggcctacttgacgtgaactttccctaacaactcactgtccactttctcgtcatttttaatgattttttcaaatatcatgctgatcatatgaaatattaagagcacccagctttactttctatttctctttttatcatttatctatctatccgtgtatctatcatcacctatttatcttccctccaagttttcaacatgaagtacattattaaatttttatgttcctcaaaagggaaaaataatttattcgtagaaaataaatgaaaaatgattgaataatgaagacaaatgataatgagctctataaaaagcaaatataatttcgtagcacaacagggtgattatagtcaacaatattatacattttaaaataactaaaagagtatagttgaatgtcgtaacaaaaataaatgtttgggttgaaagatctccatttaaatatgccatatgcctggataaaaatatatcatgtaccccatacatatgtacaccaactatgtactcacaaaacttaattttaaaaaaagaatgtaaaacataaaataaacggtagatattagaagcaataaaaatatatgttttcatatttaaacagtgaacaaatttatgcttagattatataacctgtattactggttataaatagcaatcactataagcttccaggaaagattatcccaataactactaagatgtctataaatacatgaaataaatggaaaactcacaacccttccacaatacacatgcaaactaaagtttgcatttgatgtgtacttaagagtctatgacttattttaactaactataatatcaacagaaccttaaaaagcattttaaactcaccatgactgaggtttttcctttctttttttttttgttttttgagacaggatctcactctgtcatccaggctagagtacagtggtgcaatctcagctcacttcaacctttacctcccagactcaagcaatcctcctttgatcagcctcctgagtagctgggactacagtcacaccaccacacctggctaatttttgcattttttgtagagatggggttttgccatgttgcctacgctgatctcgaacccctgggctcaagggaggcacccgcctcagcttcccaaagtgctgggattataggcatgagccaatgtcctggcctttagattttttaaaatagagcaaattaacacacttgcagggtatagaaaacctcatagtttctctccccaattcagcatctatgaattagaaactctgaggctgtatctcaggaaaaaaaattatatagctattactcagatatgtgggaacttccttaatgtagttataatatgttgagctcacttcctatgaataattgctgtgtaatggttctcatgtcactggtattggtaaagaaaattatgtggttctgtgtttaatggataaatattgcatataataagaatagctttgctggtgagcaagtgaagtggataatcatgctaaaggacaaatagtcactataaccccagatattgtatgtgtcacatactaaattatgaattatttgcatttaattgacctcattcattagacatgaatgggttttctgttttttctccatttttacctttgttttatggctgaaagttgcttgggaataagatgaaaacatacagcgattcctacaaatggaggtatgttgtactgattaaaacatgggccctgaagtaagcccattttgttctaaatctcagctatatcccttctttgttgtgagaacttgaggaaataagtaagcatctttgcacttcagattcctcatctgtaatataactacctctaatacgttgggatgtcaagaagataaaggatattactagaggctgaggaactttgaacattttctagtagtacataagctttcaacataggttaattttccacctgtaaattatcttaaggatgaagaagattcctcctccattaagtaggacttcatgaggaagttgtatggatcccatagacaacaaccatattctatctctagatccactatggcattgaagaatcattcatatgaatgtgagtaggaggacaccattgaaaaaatgactcactacttagtagaattgggaaaggagggtgataacacgagaatttcaagacgcctcataccatttttgcttgaatactaagaagtaatgatgtgcaatgagcagggaaaacagaggtaggatataaagttgggtaagtaaaagctacttagatcagagcatagtaatgaggatcttgaattcactctttttccctccaacaacaactaattcatctcatcccagtccagccacactagtttccttcaatttgtcagtttgaactttctatgcttatttttgctccaagacactaggattttctgttgctactccctggtagccctttcttttagttcttaaataactacttcgttagctgagactcatctcaaactctccccctatctatggctgtgcttcaccttactacccagtgatgcctgtatttactaccgtcatctcaactggcagattttcttctttttatttatcactatttgaggttttattataataactggggaaaaacagccacagtaaattattggtttgtgagtaaaggttttgttcttctgttgctgtatgatgtcacattctattgcaaatttattgcaagttctggactaaactgagaaaatactttttttttggacaaatattgacttttaccatgtgtaattagaatgtaacagaatttctgaatgtgtcacatggtttgaagacacagtgaatcacctttttattatatagataccttgttttctctctgtccttcaaaataatctgactataaatgaactttaataaacacatttttgcaaataagaaagaatgattgtatgcttactattcttattttgaagaaaaactttaaagagcacaatatgctggtcttcagtgaccttgcacaggttttaaatgtaaaaaaaaaaaagattataaaatttaaaatttgattatctgatgtctgcaaaaatagtcttcaattaaccttccagttttaacagataagtatttaaccatcttacttaacattacttccaataaaatagacaatctcacatatatttttgaataaataaatgaataattatataggccaaaaggcacaaccactatacttaaaatgagaatgacaagccagataaagagaaaataagatataaggcaaactggattatttttaaaagtaggatgagaaatgatggcaagaaaaatgcaatttgtgttagattttaaatcatattcaagacttctccttccaagcacaatggaataacttatggcagaataacactctcattaaaaataatcaggccgggcgcgctggctcacgcttgtaatcccagcattttgggaggccgaggcaggcggatgatgaggtcaggagatcgagaccacggtgaaaccctgtctctactaaaaatacaaaaattagccaggtgtggtggcgggcgcctgtagtcccagctactcggagaggctgaggcaggagaatggcgtgaacctgggaggtggagcttgcagtgacccgagatcgcatcactgcactccagcctgggtaacacagactctgtctcaaaataaataaataaataaataaataaaaataaccagaaaaaattcaaacaattactctctcaaaaaaatggtatttacaaaaaggcaacaaaaagctattaaagaagactctatggggactaaacttccagatagttaacagtcttggagaagtgagttcaggatctgcagctgcgtttttactgaactttgttacaaatctaatcctttctacactggtttttctcttctactctcagttaattgtcccattactttttctccgaagcatgtttgttagccagtggaggctggtgaaaatctgtcctaattaggacttggttttaggcattgtgcttatctctggatcttgagagtttcaatctgggagtttggtcttcttggtttccttatcctttgatgactctagttgtgggttcaataaaagattaagggcacataaaggggaacacaagggcacatagaggggaacatcacacaatgaagactatcagagggtggatattgagaggagggagaagatcgggaaaaacaactaatgagtactaggtttaatacctggtattaaggtattaatgtgtccggaattggtgggttcttggtctcgctgacttcaagaatgaaggccgcaggccctcgaggtgagtgctacagttcacaaaggcggcgtggaccaaaagagtgagcagcagcaagatttattgcgagcaaaagaacaaacgccccaagcctgaaaggcgacccaagcaagttgcagctgctgcctcaggcagcctgcttttattcccttatctgaccaccaccccccccccccccccacatcctgctgattggtccattttacagagagctgattggtctgttttgacagggtgctgactggtgcatttacaaacctttagctagacacagagtactgattggtgcgtttacaatcctttagctagacacaaaagttctcgaagtccccacccatcctagaagcccagccggcttcacctctcaccgtccctcgtcgccagactctgcagcacccagcccgggcactctggcagcccagagggagctcatcccccgatcaagcccggcaggcgctggtcggctgcgcccagtgcggggcccgccaagcccccgctcacccggaaccgcgccggccggcaagcgcagcgcgcggacccggcctccgctggcgcctttttctccacacctccctgctagcagagggagcgggctccggcctcagccagtcccagaaaggtgcctccacagcgcagcggcgggctgaagggctcctcaagcgcggccagagcggacgcctaggccaaggagacgccgagagggagcaagggctgctggcacgttgtcacctctcattaataccttaaggtattaataccaggtattaagcctagtacccgttagttgtttcattccgccaccccccagtgctgtcctcctacagctgcaatccactttcacttacgtgtttttgatggttaatactgtcagattgattagatttaaggatgcaaagtattgttcctgggtgtgtctgtgagggtgttgccaaaggagattaacatctgagtcagtggactgggagaggaagacccaccctaatgtgggtggggactatctaatcaattgccagctccagtagaataaagctgacttgctgagtcttccaatcatcatctttcttcagtgctggatgcttcctcccctgaacatcagactgcaagttcttcagcttttggactcttggacttaacaccagtgatttgccagcagctcttgggcctttgaccacacaccgaagactacattgttggcttccctacttttgaggttttgggactccgactggtttccttgctcctcagctttcagacggcctattgtgggacttcaccttgtgatcatgtgagtcaatactccttaataaacttcccttcatgtatacatctatcctattagttctgtccctctagagaaccctaactaatacaggtagggttaaggatagtaatgctgctactttgtaggagagatggggaaaaaggatctaagcctagtttttacctctcctgactgctactgtttcctttcctgacccatttttttttttatttccataaggaatactctgggcctctttcttatgactgttttatgggtttcataagtaagatgttaactcttaagtttctgcagcctccaggcatttcacattgtctgatctgtctgcaatgaacctcaccaaattgtcagattttttattttttaacttttattttaagctcaggggtacaagtgcaggtttgttacataggtaaacttgtgtcatgggggtttgtcttgtagattatttcatcacccaggtattaagcctaggacccattagttgtttttcctgatcttctccctcctctcaccattaaaagattgattaaaagaatcacccttgtacacaaatggccatgacgtgaagcattttctccttgaataaataattccattagtaaatccttgctctgtttctgatattagtctacccatagagctgtgattttgccaggattctctttgaaatatcatcatcattatcatcatcacccaccattaacaccatcatcatcattatcatttctgtagcaactcccttttttttacattaggtgacatcaactttttctgtcagtcttatctctcataattaaaactatttctagaattattttggtctactgttcataccagttcctgttttcagaatatcagtggtgttcttcaaataaactaatgtaagcatatttactcagtctgacatcctgaactgaattctctatgactttggaattctaactctcccctctaatttcacacatccttaacttacctttccctatgttttaaccagtaagccaatctccctgattctcaactcttaacttgttaaactgcttcagtgttgcaggataagcagcatgacatgaggtatgaaaggtgctttacttgcaataatgaacttttgaggtattttgtcctcagtcaacattatgctatccaaattcatctggactctacaccttttattcctagaatatgcccaagtggattaggatactctgccaagaagaagtttttttttctgagaaaataaagaggtatcactaatttggagattctgaataaagaagtattaataatttggagagtctgaatacaagaaataaaggaaggtcatggcccgacagataataacatttattacgaacatgcactgctttggaccttatcacagtggtatggaacaaatagaatagattagaagtactccctcaaatattttaacacatataaggatgtacatatgcatattgtgcaaatgattttttaatcacatatcagcagaaagagactacatctaatacatagatggcttggaaaaattggttaaaatctgaaagaaatattacattagacccactttcatgagaaaaagcaatatcttctctggatggccctggctgttttcccttcagtagcctagcaatgaaatcccttaggtagcctaataattaagaagtccagttggacttcttagcttctggctgaacctaatgctgatattcaaaattgtgaggaatttagcatgtaaaaagagaattattttttcaagattgcaaccatgtcttgtaaagatcagtgtcttctgacttagtctgtttatccacattctctgtctgcggaaggaggcaaagaatttgatgttaactgaaagcagagaccagtctgtccacgtggtcccagtctgcctctccctgagatgtcaagagccttaagaatcactaggattctagtatcctgttaagcctgtgtatataaaaatgtttgttttgtttttcatatgtttattttatttttcttctattctgaccctgtagtatatcatttgtggtgtttgtgcttacgtttgattgacatctttttttttctataacacgtagtaaaattatttcaaatggtgtaagcaatgttaagcaaagaagacaaatcatataggcatttaatacctgatataaaaatatagaattcttttaaaagcaagaaatcaaaaaacggtgttaaattgtttttaatactatatattctataataaacgtacagtgattctgtatgtctacatgcataattaaatattgagagatacataacagaaaaagagccgtttgtgatataactatgttcacttttatcattttaagttaattatgtcttactagtgatataatagttgatatagtaatatagtgaatttgtgacataagtaactaatctgcctccttgtacgcttcatgctaaaggctatgaaaataggaaaagactaaaatttcaatgtcacgacaattatttgttattgcgaaagaacaaagtatgtaaaactggccatttttaacaggaaaattaatgctttaaaatatgcattcattgaattcattgggtctcatattaaattttggctgttttcttcatggagccataaagtaagctctcactgttatagcagaagtcaattaagcttgctgtacacgaggatgcattgtatagatgatgtttttggtcttggaactgaagaggagaaaccacaaaagagacagagatggagtgtgcagaaattttatttgaatctcaaagaatgaacttaacagaagtcttgggtatagtaatatatgaacggtgatagtactatgtgtgatttttattctatcgcataaagctaaatttttaacttgactcataaatttaatttataaccagaataaaattatgctacttaaacctagcaaacacataattttaccaagcttgaattgatgtatacagattttaagtgatttgtatgtttaaaattgaaaattaacatgaagaattaacatgaagaatgaattaaaattattaattaaaatggaagactagtttaaatgccctcaatataagagtgatatttgaaaggatagtgtatgaatgttatgcagcagtaccagctaaatgaaattttcaaaacttacaggacatctaaaattaatggcatgttttatagttacaggggtcattagaaaatgggagacatgaaatatttaaaactggatagtattttagaacataagcacagtagctgggttgtgcattttggcatattcagatatttttacaggaatattttttcattcttaccttctgaaaaaagaaataattattttatttgattatgcagaattttaaggtatctgaatataatatggaattacggacttccaaaaagaaatgaactgttaaagattcatttctgtttctccaatttttctttctcttataattttatttaaaaatatttttgatataatctttatttcattgaacctcacatgcatatatcacagatttagtagactattgcctttattgtaataatctcctctttctgtcagtactcccaaggatatctgaaatatggatcagagtagattatcctaatctttttattacttttttcagtacaagcattcaaaaatatattcaaaaaataaacttgtaaatatacagtatataatactactgatcttccctttttaaatattcagcctcaattttcttcccattcatcagattggcttgagtggtatgagtccttctttgccaactcctgcctgcttactcagggtattttctgaggcccaaagactgaaggagtcacctctaggcaaccctcactcacttgtgggaaatcatgtgcatttctatcatcccataaacatcttcatctcatgacagcttttaaactgtttggaaacctactccgcatgcctagagatttagcaaaaggagaaggataagtaaaaaacagagccttggtttttagtttttatttttactctatcaacatcaatgattttgcatctagtttagcaaggaaatgatcggctctgtgtctcggtgctctgggaattttatctcatcattcaaaactcctaccttacttaactgtttgaaagtaatgtcaatttcttcttataagtaaaggtgttagtttgccattgttacatatggcatcacatagtatgtattaatacatacataagtacatttgatttaaagaaaatttaaaacttcttcaaattaatcatttctaaatcaccagtacaaaatattgaatgactggtggacagtaaatattgtggagtcctggacaaagtcttttttatcacactatgtcaacaacattaagtgcaatttttgaaacatatttggcactcagaagagttgtaaataagtgaatgaatgagtaaatgaaaggcaactataattggagttagtggtaggaaataaaagtcaatacatagaaacaagattttctcaaacattgaggttgcttttctttttttatccagtgataattttgagctcctaaatcatgttattctagttccccacaattaaactgtcaatgttttattctataagtactatcttcatgtaaatcagacaagcagattatagagcagcatacaatacatgtcagcaggataaacgtgcgtcacatcaaatcaaattggtttgaattgggttgaatctgtatttatgataactatttggatgtttcatgagtaaggtaggaaactacttattggaaggttatatttggtttttcttcctgagcatttacaagttctcttgtatgtggttttatcaactttaacccatttatgcctgaggttgcaattttttgaatttttgcaatcagaccttggcgatgaccttgagcagtagggtataaataacttccacatgcttagcagtccaataatggaacagtaggcacaaattcgttaaatagaaccagaatacttaatacactagacatttgtttaaaaagtcatttatctaaaacagcttaagtactttgatcaaaagtgtttaataaagccaaaaaaaaagtcaccaaaaaatgtttgtattgtttttggttggtttgtcattataagtatcgtaatatgtcagtcagtagggtatgtttaaatttactgccaaatttccacagcctgctcattttgtgggtaataaatattacactgtcaataaaatccttaaaaataggagaatttcagtcaacattttttgattccccagatttttaattttgttattgagtcagagaaaataattatgatatatgggaaccaaagtttcagcattcgagagatgccatatcttatgaaagaattagtatctttgtctatgtaaaaataaaaatctactcatactctgaagtctttattttgggagaatacataattttagccaattcggatagcaggttttatgccattactagattgcttgcatgtcttgcagtatctcgacctaggcctcttttcttgcctattggaagtcatattcatgtcagtgtttgtttggacgacatagtctacagctttaagagcttgaatccccacctgaggaattgatcaagtcacttaaccactctgtgcttctgtacacacacacacacacacacacacacacacacacacacacacacacaaatcagaatagtgatactatccattttactgcgttattatgaggaatagataaagtgatagttgcaaagcccttagaacagtgcctggaatataccaagtaacacacaagtgttgctattgttattatctttatagtctgtaattcgatgttttctcagtcaggaattcaacgtggcttattgaaggtattgtcataattgtccagtgaatctctatgcttctggagctcacaatttgatattttaaaacttcgaattcacacaaatgcaaataaatcttttaaaagtttaagatttattcacaagtaatttttttgacaatctataacaaaggctaaaaataatttttaaaaatagatagctttgtgttatgatgccaatgcattaattcctactgttattattaaataattatgagacaatgggcaaatcatttttacttcctaaagaaatttgtatcatctttaagaggctaaaagcttgcttttcagatttgtaattattaatacaataattttttatttttatttaataaaataaaacaaagcaagttgatttttatatatcacttaagaatttcagtaactaaattttgcaattgtaattttattgtatcaggcatttatcatcaaataatataattttctaggtttcatttgtttgtgaatttgtattggcaaaggggctgttttattatgttgcacaaaactaacttccctgtgatatttcataagtaacagcacattcatataactatttatatagcatgtatagattttatatatatatgtattttatatacatgcttctgaaaaaaaaattgtacatcaagtatcataactttaatgtagcagaatgaactaggagagaaaaattaaaggtcagtgattgaaccttaaaaatgttctatggagaattacttttaaggtacattctattccaattgttttcagttatgccacttcatatatttagatcgatatactttcactttgactcaatctaaacttttaataattttttatattttaaaaatataaaaacatgacaagaatagcatttatcataatatatattattcaaatatatattacatattatatataatttatagtctatgcattctgtatatatacattatatatgttatatagtgcatatgtgtacacagtacatatgtatactaaatatacctatatatactatataaatgtacaacaaatttgtaacatcattctaactacattaaggataaatccggccgggcgcggtggctcacacctgtaatcccagcagtttgggaggccgaggcgggtggatcatgaggtcaggagatcgagaccatcctggctaacacagtgaaactccgtctctactaaaaatacaaaaaattagccgggcgtggtggcaggcgcctgtagtcccagctacttgggaggctgaggcaggagaatggcgtgaacccaggaggcggagcttgcagtgagccaagatagcgccactgcactctggcctgggtgaaagagcgagactccgtctcaaaaaaaaaaaaaaaaaaaaaaggataaatcaatttgcttttcatacaaatatgatatattttgtatgtatattgtatatttatatagtgtgtgtatagtacatagtgtatatatatactatatatactacatatgtgcatatatattatgtggtgcatgtgtagtttttgtatacagtatatgtgtatatataatatacagtgtacataatgtatactacacatgcactttattagtccgttttcacactgctatgaagaaatgctgagactgggtaatttatataggaaagaggtttaattgactcacagttccgccggactacagaggcctgagaaaacttacaatcatggcggaaggcaaaggagaggcaggcaccttcttcacagggcggcagaacagaatgagtgcaagcagggaaaacgccagatgcttagaaaaccatcagatctcttgagactcagtatcacaggaacagtatagaggaaaccgccgccatgatggaattacctccacctggccccgcccttgacacttggggattatgggaattatggtttgaggtgagatttgggtggagacacagagccaaaccataccaataatgtatacatataccacacatgcactgtatattttatatacacatatgctacatatacattgtatgttatatgtacacatgtattatatattatatatacacatatgtttatataatatatgtatgcatttatgtgtatataatatacatgtattatggtcatatgcttgttttatttttatttttatttatttatttatttatttatttttgagacagagtctcactctgtcgcccaggctggagtgcagtggcgcgatctcggctcactgcaacctccgcctcccagtttcacgccattctgcctcagccgccgaagtagctgggactacaggtgcccaccaccacgcccagctaattttttgtatttttgtagagacagggtttcaccatgttggccaggatggtctggatctcctgacctcatgatctgccagccttggcctcccaaagtgctgggattataggcgtgagccacagcacctggcctatttttaaattttttataaatctatacactatttttcataacagctgtaccaatctacattttgaacaactgtgttttataatcatttcttatctttagactttttgatgacagtcatccaaatggatgttaggtgatatctcacagtggttttaatttgcctttctatgatgattgatgatgttaggcaacttctcatatgcctgtttgccatttttatgtcttctttgggtaaatgtctactcaggtctttttctagcttttactttggtaatttgtttttctgctattgagtggtataagtactttatacattttggatattaactttatcagatatttttattttaatttttgtgggtacatagtaggtgtgtgtatatatatggggcacatgagatgttttgatacaggcatgcaatgtgtcataatcacatcataaagaatgagatatctatcccctcaagcatttatcctttgtgtcacaaacaatcaaattatactcttagttatttttaaatgtatgattaagttatatagtcacctgttgtgctaccaaatagtaggtccttttgattcattctattttttgtacctattaagcatctgtacctcctctacaccacccccaccccccgactactcttcccatcctatggtaaccatccttctactctctatgtccattaagtgtaattattatgatctttagatccacaaatatgtgagaacatgcaattctgtatttctgtgcctggcttatttcacttaacctaaagatcgctagtttcacccatgttgttgcaaatgacaggtctcattctttcttatgattaattagcactccattgtgtatgtgtagcacgttttctttatccatttatctgtaggtgaacacgtaggttgcctccaaaacctgactacgtgagtagtgctgtaataaatatgagaatgcaaatatgtcctcaatatactgatttcttttgtttggggaatatagctagcagtagtattgctgggtcacatttgtattctattttttcattgttgaggaattttcatgctgttctctatagtgtttgtgctagtttatattcacaccaacagtgtttaagggttcccttttctccatattcccactagcatttgttattgtctgtctttgtataaaagccattttttactggggtgagatgataactcatagtagttttgatttgcatttcatgcaaatcacatcatggtcggtgttgagcaccttttcatatgactgttcgacatttgtatgtcttcttatgtgaaatgtctattcagatcttttgcctatttttaagcagattattagattttctcctatgaagttctcatcatttagctgccacttaaaagtgagaacatgtggtatttggttttctatttctgcattagtttgctaaggataaaagccaccagctccaactatgttcctgcaaaagtcattaatttttaaggctacatagtattccatggtgtaatctctaccatattttctttatcctatctgtcatggatggacatttaggtttattctatgtctttgctattgtgaatagtgcctcaatgaatatttgtgtgcatgtgactttatagtacaataatttatattcctctaaatttatacccagtaatggtattgttctgtttttaactctttgagaaatcaccatactgctttccataatggctgaactaatttacactcccatcaacagtgtataagtgttcctttttctctgcaatcttgtcaccatcttttttttttttactttttaataatagccattctgcctgatgcaatatagtatcatcgtggttttgatttgcatttctctaatgattagactttttaatatgcttgttggccacatttgtttttctgttttttgtttgtttgtttgttttttttttttttttggaaaagggtctgttcaagtcatttgcacactttttaatggggttgtttctttttcccctgtaaatgtgtttaagtttattatagatgctggatatagacctttatagatgcatagtttgcaaatattttcacccattctctaggttatctgtttactccattgatggtgttttttttttttttttcctgtgcagaagctctttaattagatcccatttgtccatttttgcttttgcttgattgcttttgatgtgtttctcatgaagtctttgcccattcctgtgttcagggtgtattgcctacgttatcttccagggttttttaaataagattttggttttacatttaaatatttaatccatcttgagttgatttttgtatatggtgtaaggaaagtgtccaacttcaatcttctgcaccatttattaaagagtaagtattttctccatttcttgtttttgtcagttttgttgaaggtcaggtggttgtaggtgtgcggccttatttctgggctctctattccattttgttcatctatgtgcctgtttttgtaccagtaccatgctattttggttactatagccttgtttgaagccaggtaaaatgatgcctccagcttcggtatttttgctgagaattgccttggctatttgggctggttttgtttccatatcaatttttaaatagattttttgggttctgcaaagaatgtaattggtagtttgagagaaatagcattgcatctgtaaattgctttgggcagtatggtcattttaatgacattgattcttcctcttcatgagaatgggaagttattccatttatttgtgtcttgtctgatttctttaagcagtgttttgtaattctcatggtggagatctttcacctccaggttagctggattcccagatattttattcatgttgtggtaattgtgaatgagattgccttccttttctggctctcagcttgactgtttttgatgtataacccattatttttagctgataataactttgtttgcataaacaaataaaatactaataaaaactctactttgtccaccagctttttttttttctatttatatgttatggtactgtgtcttaaaaattgttgtagttatttttgattggttcatcatttagtttttctagtatgaataaagatagtttccacccacagttgtgataatattctgtgtttttctttgaaatcattattagcagtgagttttgtaacttcagttgattatttattgcttattaccatccttttctttctgattgagcatttcttataggacagatctgatgttgatgaaatccctccatgggaaaattgtttgtctgggaaagttgttatttcttcttcattatgaaaggatatttttattaggtatactattctagagtattttttatttcagcatgttaaatctttaaatatgttatgccgctctttcctggcctgtaggactttcactgaaaagtctattgtgagatgtcttagagctccattgtgtgctatttgcttcttttatcttgctgcttctaagatcttttgtttatcctagatctttcagagtttgattgttaaatgccttgaggcagtcttccttgggttaagtttgccaggtttctataaccttcttgtacttggaaattgttttctttccctaggtttggtaagttccttattattattcttttgagtaaactttctacccctatctttttctctacttcttctttaagggcaataactcagatttgcattttgaggttattttctagatcctgtaggcatgcattatcattttttattcttgtttcttttgtctcctctgactgtatgttttcaaagagcttatcttcaagctcactaattctttattctgcttggtaaattctggtattaaaagactataatgccattcttcagtatgcccattgcatttttctacttaattcgttttagttatttcaacctcttgtgtaatatacatgatggaattctaaattacttctctgcattatcttgtatttctttgagtttccttgaaacagctattttgaattctctctctgaatggtcacatgtctcttttttccaggattggtacctggtaccttacttagttcatttggtaaggtcatgttttcctggagtgtcttgatactggtagatgttcatctgtgtctggccattgaagaattatgtatttattatagtcttcactgtctgagcttgtttgtacctgtcttccttgagaaggctttccagatatttaaaaggacttgtgtgttgtaatctaggctgtatcttctttttcatgggaataaaagtggtttctgagaaaataaaaaaagatagactgaatgatgtggaagagtctttcttagatggtatcctagtccttattgacacaaaaaatgttgcccttttcagaatgtttcatatccctcataactttttaggctaatgaaaaatatgtgatattcgtcatatatgtgggtactgttgtgctctaatttatgttttaaagttagattaagcctgtatctacactcctgtgtgtagtcagatagcatttttactattatgcagtcacatcagaatgtcaatttcctcctatactccttcttttaaatgctgctattgatttatttatttaatgtcatttgcttcacaaggttgttacggatattgaggctcaagtattgtatcttgaacttattttctacatagagcattatggttatgttggggcaattacaagggttaatttaggcagtttttaaatcatctataaggagcaattatggtatcatctataagttataccaccaaaaatgcattcaaattgtattgttttgaatgcagctgcttcattggttgtcattaagtcagggaagtggatgtgatactttcaagagttgcagtttttgaataaaaattaatcccacccctatttctcaagttataaaaccattagcttgacaccacctcacttataaggtatgatgtagccttaaaagtaaatgtgctttgggtcaaatggatatagagacagtgagatgtaatgcaaaagcctgaaagtatcatagaaaatatatcaggccctatgtattaatggctctgtaacttgagcaggtcacttgatctgtctgtgtttactttattgggttttaaagaatcaccttaaataaatgtgaaagtcacttatataccaatacgtcttgcacattggcaaatcatcagcatacctctattctattgcctgtcccatagagtaattgaaaccagttaacttctctgaggatcaaggtttttagtactcatctctggacacaagatacttgagaagagaattgatgctgagcaaatgtttctattcaagggctgtatatagaattgaaactcaatgggctttccttaaaaatatttttactagaattttgataaacaaattgcgatactcaggtcactagacttttctgtgacatagtgagtcagtggaagagtgagttaaagaattgaactttctacaaagcaacttcaaaccaaagtaatttttatcaaactagcctaattactgcagctgggaaaagtttctgaaagtaacatgagcttattttcctgtgtttaactgacttaataataaccttatcttataataatatactttgctctgtcctatggaaaattgttttcacaacagtcaaattaacaccaactgaatcaaactctgtgtataatgaaacttaatatcaaattataaacaaatatggaatttcagctatgtaaaaaggataatgttacctttttttcccttcagtgatttttccattatttcaaggctaaattctaacttttttttttttttttgagatggagttacatttctgttgcccaggctagagtgcagtggcatgatcttggctcactgcgacctccacctccagggttcaagtgattctcctgcctcagcctcccaagtagttgggcttacaggtgcctgccacgataacctgctaatttttgtattttttactagagacagggtttcaccatgttggccaggctggtcttgaactcctgacctcaggtgatccaccagccttggcctcccaaagtgctgggattacaggcatgagccaccgtgcccagcagatccttaggatttttgaacttgatgttccctcacctgcctcaggacattaaccttgctgctttcttaacctataacagccaatttctactatttcaccctttgtactcatttttcagttgccactatcaatatttggttttatgttttatcttcaagggaaacttgcccaagtctgtggtttctctattacacatgtaaacagaatcttaatttttttcagaatatttccccaattatactgcatgtaaaataaatcattattaggaaaagaaataacaattttctagggaggaaacaatctagaacacagttcaataagcatttgcattatgcttcttgtgaatattggcttaatattttttacacacactacgctctgaattccaggagtctaggaattgtatttactttgttctccagtgtatctatctctagtcccagggcaatgttctagacattgtcaaaatttaacaactatacactaaataaattaattcaattgacaccttagaataatgttgcttatcttcaatctgctaaccaagaatgccaactgaaatgcaagacaactgctttctacttagtttatgcccctgcatgttgaggatgtaaatcaacttattgcctagcagagttattaaaataaaaattatgtttactctcagtattcgatataaatttataataaaaaacaatcagtgacatatacattttattaacaccttggttgagcaaaaaaaacagattaaccttaatgcaaaattcaacccaaagtttagtgattgctttggaaacgtaggtatacacttttttatctctagtacttaagatagttcattttgctatttatacaaatatttaaatttaaaatgactaataaaaactgtatcttttggaaaatctttcttatacaatgaaaggagtgagaaaataaggaaaaattaggtaatggatactaggcttaatacctgcagaatgaaataatctgtataacaaacccccatgacacaaatttacctatgtaacaaacctgcacatgtacccctgaacttaaaaattatgaaatatatatacagttaaatttaaatgaagataaatatatatgtaggagtaacacaataaatttttacatctttccatatagttaactttcatggacagaaacaatcgacctatgaaacaattagaacaatgtatgttaatcaatttagattgcaattaaataccatattttaagcatcttaaaatatactcacctgttattttattgtctaatacctgatttaaagtcacttccgttcagaagctacaatttatcagtgatggtgagtcaaatggttatcagacagccttcggcattggccaaaaggagaattcacttttccctctttgtgcctcattataaacacatgggaaaaagtgaatatactgctcatttcagttttaaaatctaagcatccacagaaacagaaagaaatacctgcagaactagacacagacatttattctatttgtggtggtaattatgtattattttagtatcagctgcacaaaatcacatctgtgcctgtgtctacaatttcctctaagcttgtttctaaatgtcacaattaactatatctatttttgataatttgaagaaagtagtgttatttttgaaatgataatgcgctttctttttgtttttgacagtgatttttctgttttgctttattcataggcacattttttctttagttatatatttgtgatgttgaaattgtattcatttaaatacacccacagatacagataataaagtagcctctatcaaaatatcactgtcaggtattttaaatatgaacaggaaaattggcatatgtatcttattctagtaagaacctattttcccatacaccatataagttttaagctcccacttacgtaaacacctgttttggctgttgtttccagtttaatgagtttggggaggtttatatctctgaactgagagtagttctatcattttgacatttaattttgtttctcttttataaatgtcttgtaaaaagagaatcatttagcatctgttttgttatcttccaacatctgtcctacctacccactgtatcaaaaagtgcacacttcttaaatcatagattgattcaatcttttcaggtggatttcatgatgccatcaattttttagtgaagctttaatgtaatatgttattgcaagaaatgttttgtcatttattaaggtattattagtatatacatgtataaaattctgaatctacatcgaaaaatgatttggagacttgaaccaattactcacaaaatataggagagagtcttctttttgagaaaaaggggagctgcgtgcaatttgttcatatgtttggcatctcagctgtccaacttgaataaatcatgacatgctttctcaaaacttcaaatgatcgtgactgacttaatttatgtacacttgaaaccactcttatattattgttttggaagtataattaatataataataattttgtcctgttttgggatatctctgcaatgagatcatctttaaagattataattattctgtaaaattcagtaaaatacattaaaaatataaaatcatccgactaacttctttcccaaataatttaaagaaagcttttgggaagtaagtagggctcaatgaggtcctggcgttgaggccctcatgatagaattaatgcccttataggaagagacaccaaagagatggttctgtctaaccccccttttccacttcagtctcccatccctgtaccttgtgaagacacaataagaagccggctctccgctagataagaagtgaaccatcatcaaaaatcaacagtgccagcaccctgatctgggacttcctcattccggaaatgtgacgaaataaatttatattatttaagctacccagtctgtggcatattgttatggcagcttaagtgcgcagagacaatatacaaaaaaatcacaatctgtaaaatgcattcaaattttattgagccaaacccgtaccattcaaacgtattaatgagagactttgatttggaagtgagcgaattgaggaaggaaactctaaggagatgggaattaatttttggctaattcagcaggcatcttaatttcaggagcagctgtggattgagttttgggcacagaaaaggcatcaatgaagctggcagtatcattagaagcagcagttgcctccagggctcagtgaggcaatggcaatcatgatgtttccctgacgggcaatttttttctccatcatgttgtcgagttctgaggctagttccccaactctacaaacaattctgcgaactgattttatttttctttttttttaatgaccattttcgcttcattagcagaatcactttcattgactgctattaagatccctgactgatactgtggaaataaacaatgaataaataaatatgtaatgtatcattatgattttatatacacaataaaaataaaccatgataaagagacgaagtgattggagctatgatttcaaataggaatatgaaggaaagttggacctaaaaagactcatgtttctgcatgtttcaatttgggagaaggagacaatatttcaaaagacttgattatagtttagtaatgagctctaaaagatctggataagtatagttcatgcctaactaacaggcagtagaaaggcccagaggtaaaaatatgctttgtatacatgagaaggaatatatcatccagaatatttttcaaataataaaatattacttatcaaaattttttataagtacatcaggcacatttagtataataatcttttaaattgaaaagacataataatctaagaaatggatatactctctttgtttaataacaacaaaacaaaacaagaaaaccataagaattagcactatatttaatgctttgcctaaaaatatatgtcattgtttatggtgcaacatatgcatcattgactcatttttgataatatgattaatgtttattgaacactttttgtgcatgaaatgcattccattctgttcctgattcttttatagatttatgtaacatagcattcatattgaatattagaatgcagaattgtgtattcctcttaatttgtctacagcatatattactgatgttttgaaaagtgacttgtgatattttattttataaatagaaagaagttctggaacgttgcttataattggggaaataagcacaaatgaaagaccatggtatggtgagatatagaaatataaataaatggagagataaagatatatagttaaatatgtattgattatttcatatttatcactattatattttgataaagctttggttttacctaatttttaaaatactaaatgttaaaatcccatagaaaattagaaatataactgagagccacatgcatagtttgaagtgtcttcctttcgctatctatgtggacagagactgggaagtttctccactgctctaagagtaaccattacctttacagctatagttactgctgccatcatgacttaacagtaactaaaataacaaaaatggattatacacttttccaaatttggaaaaacaatactgaaatctaactttgagaaactcatgttcactttactgcaatgattaatcgtttgcatttatagttccacagtcagaagtactgagcccctgtatgttcccaaactttcatgaagagacaggtttcattatcagatagagaaattgatgaaggaagaaatagatgggaagatagatgatagattggatagatagatagatagacagatagatagatagaaatatttatgattatttttctagactcattctctaggaaatcgaatattgatctccccatgaacttcatacaagtaagttttccatgagatgtatttatgacattttccttttgtcatttttatgatcaaatataaacaatatttaagtatatatattttcacttaattatgtacaaaaacatattagaaaacaccaaaaaagaggaaactactcccaactctcttaacttttcacaatgaaaacttttatcaacgatgctatttttctaaaaacttttaaatgttgaaatttggcatggtcttcaacgtgagaaacgacaatatccttggcatccaatacgcttttactatttatgctgatggcaaaagaaaaaaaaaagtgcttggaacattaacaaaagtgttaggttgttttacaacatgaaaactgaattaggctatgttccaccagtctatttcaagaattgtatttttgaatttatagtttgaattatagtagaaataagattattttctaccatttatactttgttattctattgataagagcaagagaaaaattacaaattcataatttaagtgtaatgctgtcttcacaaagcatttaatttgccaatttagtagatttttgtagcatctcatggtttctgcttcaaaagacaattttctgataagtctaaagaagcatttccctcaaaattgaaaaaatgatacaattgttcaggttatatctttagagccaacatgtcataaaagcattttcagcaacatacaatgtattaactgtaaatgctgaaatagaaattttacctaattatattcttaaaaatagctgctcaacctcactgcattagcaattcttctaggtttttttttttgaatgggattctttttttttttttttaaatcaaattttctttctgggtatgtcccccagaaactcttgttacttctgtgtaaagaaattgagaacaacttgttattctgttctatattttaataactctttaagcttctaagtatgtgcaaattattctaagccttgtcattatgaaatgtgatggatgatatttataacagacacagcttttttccttgtattgtgtgaagagtgcttgctggtaaaaaataaaattatagaacacagatcacaaaatattgaggaagacattctttactgaagtaggaaaggcatttgcgtcgccaaaaattatacgtgctgtgtttcagaatatatagacttcctctcagtttaaactttgtttggaaagaaaattttcctccaaaatgttgcagaaagacttgtaagtttccaaacctatttcactaagatctctcatatcatgcttgagttttttactttacaatgcagaaagcaacctggtctgctacttgaagacaaagttattgctttagcacagcatcacattttgatagtgttagcatttatataagaactgcctttttccaataatgaacctccaaatgaacataggcaaatgttattttttcatagtttttcaatatatcaacatttaagtcagttttcttcctttcttcttttaaacagcacctctccatccccaattaacattatctgacattttcatatactttcaactttgattttattctcatatttagttaaaaacttttttggggtcttccctattctgcagtacaaacggaaaacaaagattgaaaataaactttacttttgactaacagagaagcattgttcctttggtgtctcttcttatttgataatcaaactaaagccagagtatgtataataatactttaatttattccccttgacattttcaaaaatattttcaatgttatagaaacaaaaagagccatccatacttttaaatatagtaattattcttttagtctctattaatgaaaaactacaatcatgtcaagacaatgattgaatattaagagactgcaaaggtaacttcccaaatcagacattcatccactgctgcaggtctgttgacatcatccgtctcttttcctggctattacagcacatcggctttagtttgcttcatgggagcaaaacctcgtagtttctctgtgcccctgccttgtatgtccccagtagtttttccttctctcacaatgtttaccattcattaccaaaatggaatcctgctcagtgcctccagatccaactttggaatatgggggagttagttaaaacctttggccaatgaatgctaaaatataaagtcttcattctcttttcatccatgggcaattgagacatgcagtttagctggtttcttggatcatttaagtcaggagtcctcaaccccaggcgatggaacggtactggcctgtggcctgtaaggaaatgggccacacagcaggaggtgagtggcaggttgagccagcattgccatctgagctccatttccaggcagatcagcagcagcattagattctcatgagagtgggaaccctattgtgaactgtgcatgagagggatctaggttgtgcactttttatgagaatctaatgcctgatgatctgaggtagaacagtttcatcctgaaaccatcctcccacccggctgtggaaaaaatgccttccaataaaccagtctctggtgccaaaagttttgggactgctggtttagagggatcatgtaatcagtagtaacggtcaggattctagaaaaacaatgacccctcccaactttctcacttcgttcccctcatctcagactactgactcagggattctttccctagtaaaagaataacataaattgctgcctaaaacacttctttctggataactcgggctatgacaccacttgtgcagccacaaatcactttgttgaaaacattatttactttttttattcagagtatttgcagaaatgaaatcaaagaaaatgtgtttcactttaaaattgttctcagtgtccagaccttctgaagatcacttacaaatatttgttaagtatattatttctgtaataaaaccacaatagatatacagtagaacacaatagatgcatcttttggcaagtatgtatctagtcacacaaggatcccttttaatttatttacttcatgtctataaaccaaacaaatgtgagtaaaatgtatgtatatattaaaacatcaaaatatagatataaccttaacacagataaaattaatatatccttataaaaattctatatgttgctatcaccaagatattttttcctaaccgtattacagattgaattcaatttcaacattgatatttgtttcagtcacccagaataggaagagaactagtatcagatcagaccaaaagttgggaactatatataaataattggatcatgtctaaagagatgaattagactgtgatgttgggaagaataaaggtggaaaactaacttaaattattgacatattaagacatgttagaaaataaatggcttcattccattaaagagacatttctttgaatttaaaaaatgtgtatttatagtgaaggaaaaaaaatgtagagttgataaatgtcttcaagcctgaccttgcatattctttatttttataatattcaagttttgatcatattctaagcattagtgctcattcacatacatttttagttggtaaatttgttttcttcaccagcatatatgggcactgcaataaaaaattaagcaattatgtttgatttggtgtaaaactatatttcgaggaatatttgttaaaataattgcaattatttttcctgaggagtacctttttttttgtcaaatatattattgaaagtaagcagtagttacacaagtttcaagcctgtaataaaagaagataaagatgtttgccattatttgtattttatggaaattgacaatgaagagaaatacatttacctccagacaattatatatatatatatataatagctagatagatagacgtagctgtagatacatgatttctatatctatatctacatattgatatatatacatgattccatttctcacattttttgttattctctatgtgcatggccaacaatgtaagttatttagctacaagaaacaaaatctagtcaaattttgctttgtatatagccaacatcatgaaaataccatccccattcgattttaaatgggctacatggtcttcattattaaaagaaaaatggaatgaaatgtcaaatcaggagccgtgtctattatcattcatgttacatttgataaagaaatatcatcagttttaaatactacttcaatatgcattacctgatatttctcccagagaagaaaattataatgtttgttctgtttttggcatatctcgtttcctaaaactgaactaaagaaaagaattgtagtggtagtgcatttatttgacaagctaattgaagttgcacaatatgtcagtctgatttccaaggacagaaaggttaatggattgtgctcctgcatgcttgcacaatagctgagttttctttattgaaataactgtgatttcctacattagtagttacttaattcaagcagcaaagatgtatttgaaaggaaaacttaatccttataaaataaacccattttagaatatgcagttcacaaacttacattgaacacataatgtcatgtccttgtcaaataatacaaaatgcgcagttctcattttctctgttaaaagtgttgtgatttcaatgtgaatctatttagtgggacaacacaaccagggagcattttagacaagtggtatttagtctgttacattcctgccatagacgagaaacatgagattttctttgttacaattcagctccagttaaaaataaatacaaggtgcatgtcaatagtaattttttcatatgagggtaatgtttgaaaaccaggtggctagagtggagttcatttaaaaaataaaactgggttaagaaaggccattgcatgagtacagacgtcaatgtaacattttaaatgtaattattaatgttgaaatataaaaaatgtcaaggcctataaaaactgaaagaagagcaaaacatggtcatttttatgatcagcatagtaatttttgacataagtttaagggtataatgtttgacagaagtttaagggtataataaatttgacatatgtttgggatgtaatgtccataaatttttcattactctgggatttatataaacattttaaaataatatttattttttaaattacaaaacaatataggcttaatcatgtatctaccagtttagtaaacatttgttataattttactgcattgcagacactattttaagtctttagagattcatcaatgacccaaataaagaaaaattgttgcctgcatagaacttttgatgacactataagcaagaaaagcaagcaaactaaacatcagtaagataatgacaagtgctaaagagagcaaaagagaaaagtgaagtcaaatataggtatgtagaaagttccatagtaaagggtctagaataaatagaaatggcaagggagaaatctttcaaaatatcttactatgtttcattcgtagccaaccagtgtgtgcactctgttaattgttcaatgtgcctatattgtttctcgttatactctatactctaaatacataatatagttatatatgttacagtctataatgcacacattttatggttagaaatttaaaaaatagttttttgtagatttcatttttagccttattgaattagaaattatatgtaaaaatagcacatatttaatatatacattttaatgagtttagactttgtatacacccatgataccatcaccacaattgagatgcttaacgtagctatttttttcttttcttttctttttgagacagtcttgctttgttgtccaggctgtagagctttggaatgatctcggctcactgcaacctccacctcaaatgttctagtgattctcctgcctcaaccacctgagtagctgggactacaggcatgcgtcaccaggcccagctaatttttttttgtatttttagtagagatagggctttgccatgttagctaggctggtctcaaactcctggcctcaagtgatcctcctgctttggcctcccaaagtgctggtattacaagtgtgagccgccatgcccatacctttccttgtttttgtgtgtctgtgtctgtaattttttcatttgcgatgtgtatgtatatgtgtgtgtgtgcacgtgtgtgtggtaagaacagttttatgagatatatcctctaaagggctcagtatggtgttgtgaattgtaggtgctatgtcatgcaatggatctttagaacttattatataacagaaatattatagccattgagcaacaatttctcattttcctctccccagtctcttgcaacctcaaatttttttctgcctctgtgagtttgactattttatatacctgtgacaaactgaatcatgcaatatttgaccttttctgactggcttatttcacttagctcagtgtcctcaaagttcatccttgctgtcacatattgcaggatttccttttgttaatgctggattatcttccattgtatgtatatatcatttttaagaatacattaatctatcaatggacatgttgcttgttttggctattgtgaataattctgcagtgaatatgggagtgctaaaaattctttaagaccctgactttgggcaaatacccagaagtgggatttgcatataatagttatatttttaattttttgaggaacttccatactgtttttcatattggctgcatcattctacattctcgctgatagtgtataaggattctaatttcttcacgtttgccaatttaaaaaattaacaaatgatgtgattgtgtcaagaattgtgatcatttcaatatttggtatttcttgccaagtacacccacagaaaatgattttcaattttataattgaaaataataaagaaaccgttactgcatggatgtgtagtcactttctcattcctgatgataagagataaatggtacatgatatcactcactataatgaacaatttactggattaaacgttatctttttggttatttgaaactttttacggttaaatatcatttttacactgtaaattaagaacatataatttgatgaattattatactgcaaaaagtcggggcaggagatatagcctccctggaaacattctacatgcctcttcccaatcagaaaccctctcttgctaagaacaatgactagcctgattttgcagtaaatacttcctttcttttctttatagttttaccaccagttgtgtgccacttaacactacagttgagctcttctattccttattcccctaaagtatcctttaattgtctaaagaaactatgtctagatatctttgtaattaacttgttgaaaagccattgtattttttttttctgtagagtttccttcatatatatctacatggcataggttagtgtgactctctataaattaataactaagttgagagacttaatcagaattaaagttcagtttttttgcttgtctaatttataggcggtaagttcttcaacaggaggcatataccgtaattctttctttttatagttttagcagttcttaatgctccaagtctaaatccatttttccaataggtattgaaaaatgatgatattataattttattatttcttcttcagctgtttgcctgaaaaaagaaatatctatcatttggttacccagtggtttcatccttattaaagaagcactccatctcttcttttcttttaattactaatggccttaatctgcttgtgttgctataaagaattacccgaggctgtgtaatttattttaaaaaatggtttatttgtgtcataggtctgcaagctgtataagaagcattgcaacagcattttcttctgacaagggattcaggctgtttccattcatgtcagagggagaaagggagctggcatacagagatcatgtggcaagagaggaaggaagatagataggaggaggtgtcaggctcttttcaacaatcagatattgtaggaactaagaaggagacctcactcactccagtgagaatggcaccaagcctttcatgagggatctccttgcatgatccaagcaccgttactaggctccacctccaacaccggggatcaaaatttcaacatgagatttgtggggccaaacaaaccatattaaaatcatagcagtaattttttaaagaatgaattgggtctctaacattgaccaaaagttatgactttattattattataatttgcaattttttatatgtaaacatatatgatggggttcaatctgcaaccatgcttttccttaattatccctaaattatttcttctttggataggggacacctcttcaaatttgcttctgagtcctttggacatggccctgtcattgggtatgagaagatgttctaggcacatactggtcactttctgacctgggtgtgggtcaactatacttcaagaagccatgttttgttttactgagaaatgacatttcaatctaataactaggaatagttcttaatactggtttggttattgtttcaagccattttcagttggcagagcaatacacggaaaagcattaattgacctctgacactgtgacttgcaattcaggactaaagattgcttacttaatctcttctaccctatggatgtatcattttttcatcattttaattatatttaaattgtttattttgtgtgttttccccatttacggttgtaagtataccacgagatatacagccatcaaaatgtattttatacctcttacatctcttataacaagtattcttagttctacatatatatatattcagtgttgtgcactagtttttatatattctgatgtctttccagtcattagaattgtttgaagcacattcagtgacctctcaaagtctcattctatgaatacttaaaatactccacgacagtttttcaggcgcttttatatttgaaatgtgtttaattggaaaataaatctgtagctcatatgttcttttattaactgttaaaaaaagataattttctctttttgtctggcctcagtgttactcttggaaagtctgctgataatctggttgtattttataattcctttgttttgttgattttgtttgtctggatgcccaaagcattatcttttctttctttataatccatggtaggcactataaagtttcccaaagatgtccatctcttaatctccagaacctgtgaaaatgttgtctttcatggaaaatgggactttgcagttgtgattatgttaatgattttgagacagggaggttaacctcgattatctgggtggctacaatgtaatcataagggtgcttattaaaatagagggtgaaagaaaggatcagagtgagagaaagagacgtaatgttgaggacagatggggaagtaatatgagactgcaagcctaggaatgtggaaaacctccagaagctaaaaaagtcagtgaagatacaggttttcgcctagagcctccagaaggaacatattgacttttgacctccaaaagtgaaagataacaaattgtgttaggtttgaagtctgtagcatttgctgtagcagcaataaagaaatgcaaggtcaactatactggaatatgtatcagtgttagttgttcttgattaatttcctccaataaattgatgttctctttcaaaatgtaatttcagggacgattttgaatagtagcatttttcattttcttttttcttgctttggttgttctttgtcagaaaaatctattacatgtgtgtatgtgttgcctatgttttaatttgtccttatttatttatttattgagtaggagtcttgctctatcactgatctcaactcactggaacctccgcctcccaggttcaagcgattctcctgcctcagcctcccgaggagctgggattacaggcaaccaccaccactcctgcccggctaatttttgtatttttagtagagactagagatgaggtttcactatgttggctagactggtctcaaactcttgacctcaggtgatcctccacctcagcctcccaaagtactgggattacagttgtaagccaccatgcctagcccttctttcttaaataatttttgtctttttatttcttttaattttaaaagctttcgccttttaatctttttcacatacaatatgatttgtttttgtttgctcatgtgttactcagaggaaaatcttcattcctgaaatgattttcttttatttaactctttccagagttcactaacatatttatgctgttttttaacaactttttttcatttttatcttctctttttttaaaattatactgttggattacagtgttgtatgttcaattgacatatctttagaatatattttattatttataaatatataattccaatatatactattattaatttttaaaatgataattttgtgtgttatgcccttaatcaggtttcttattacatttttactgtgaattagttttattaaattctagaagagaagaatggttaaagttagcctgtctaattttgtagttctagaatttcctccaccgctagttttgtgaaaagttcaaaaatattagcttaattttcttaactctcctgaaattgcttaagttccaaaattttatctaagccttccttatattttgggctccattaaccctttcctgctcagttttgattttttgttgttgttgttgttgtttgtttgttttgagacagagtctcggtctcttgcccaggttggaatgcagtggcacgatcccggctcactgcaacctccacctcccggatttaagtgattctcctgcctcagccttccaagtagctgggattacaggcgcctgccaccacgcctggctaatttttgtatttttagtagagaaggggcttcaccatgctggccactcttgtcttgaactcctgacttcaggatccgcccagttcagcctcccaaagtgctgggattacaggtgtgagccaccgcaactgacctagttttgatttttttaccttagattctcctctgtaagagacttttcccaagagtctagatttcttcaagcccttcagactttactataaattatttgcaaccagctgtaggtgttcacacttacttattcagacaaccatttatctgattttctcactgtagattagttttgtctactctaaaacaatatcaatggaatgatattgtacatactcctttttttggcttattttatttagcaaaacaatttgtgattcatctagtgtataaatactctggattttgtgtatcttttcacccattgatagatatttggagtcatttctagctttaaacatttataaaatacatggggtaaatatttttgcacaaataaattagagacttaagtttttatttctctaggataaatagaaaactagatttgctaggaaatacggcaagggaaaataaattttataaaaatatatcaagctattttccaaagtaattttaatgttttcagatcccaccagcaatatattagtgttaaagttgttctacgtccttgccaactctagtgttgtttttattttttaaatgtttgttgacactttttttaattgaaatactgttctatttattctagatacaactctttgtcaactaaaggtgtttaaattattttccattcatttgtgcctttattcattcagtacagggttttaaaaatcttaattactatggctacaaaacggttatatatatttatggggtagatgtgatgttttgatacaagcatgccatgagtaatgatcaaaccagggtagttaaccacctcacgcctttgtaatttatttatgttaggaacattccaattccattctgtcagttattttaaaatatacaataaattattgttcactatagtcaccttattgtgctactgaatactagatattattcatcctatctaactgcattaatttgtacccattaaccatcaccgcattcccctcccatccctgccaccttttccaacctctggcaaccgtcatttcactctctagctccatgggttcaattatatttaaagggaaaaataagttaggccagggaatataatgcagagctctattatctctggaatatcttcatttttcctttctttgttatagaatcatatgcaaattgatgttctataggacataccacattgtcttatttcttataattctataactagatttatttaaaaacataatttgagtcatagaacacatgatagtaagtcaagaaaaacattttaagaatgttaacaatttttaaaatgggtgattttggggtaatcacacctaattatgacattaacctggaaggccttcaaaagaatgtatacatcagaaattgatgcattatgggaaatacatagaatttcaaaatatgttgaacacatagaattttaaaatatgttgaaataaatcatttgaagcacaattctcatagattcaatattagtctattcgtttcccaggactgctataacaaaataccataaatagggtggcttaaaataatagaaacctattttcttatagttctcaagactagaattgtaaaatcaaggtgtcagcagagtggtgacatttgaggctagggaagaatccttcctgggctcttactagtttctgatggttatggtccccattggcattccgtggcttgtagatatcacttcaattagcttcacctgttacatggaattctccctgtatgtctctgtgccattacatggctttcttataaggacatccattgtcgaattcaggtcgacaaaatcagtatgatttcatcttaactaattatatctgcaaaaccctatttccaaataaagtcacatgagtttctgggtggacataaattttatttttgggttagggacacttcattacattgcacttagtaatatatctttttgaggcaagagagccacatgagaatatagcttgtaacttatttttaaatatttttctatccaaaggaatcttcattttattcaagttaatcttatatgaagcatcatgaaatagaatgaaaatggtcaaagctcatctgattgcaacagaattcagggtaagaagcactaaatcacagtaccctcgtggctttcctttcgtctgatagtgcctagaagacacaagagcttagcttgagaagtctattgttttttgtttttttttttgggaaaagtaaaattttatttcttcagtgtctcaagaatagccactgttaacatcttagtggtcttttagattttattttatggatatattcatatatatatgtatatgcacacaaatatccatttatataatgtaaacattttatattgttatatgacttttcccatttaacattacattatgagcctttcctgtgtcattaaatattactgaggtacatgaggattaatagatacataatgatttaattattttctgattattacatgttaggtttcttctagtttgcccctcttatatacaattctctgatagaaattcatacacgtaaatctgagcatttctgacagttttctttggtcagattcctaggaggagattatcgaggtaaagtgttcttttttttttttaaatgcattaagggcagaaaagaaaaaaaaaaagagagaagtctattgttaattggattgatgtttagcagaatctaagggcagaagagaaaatacttctcaaatatcatatgaactgaatatttcttttaaagtggtaacagaattgctgacaacagttccggcaaacataaaattaataattttagccactctgtcttttttggcacaaagtgattctatattatattgcagacattctgccttaccttgggtattttcagaaagtaatgagaaatgtcattcaaggatgtttgaagaactggagatcagagagcaaaaagtcctttgatcttgctttgagtaaaggagataccgaattggcaaatgttactataaaatacaatagaaatcccattaactgaaaaaaaattgtatactggcatgatgctcaatagtaaaaatagagtttattatcacataaccttagtaacaattcaagctccacaggaaagctaaaaatcaactggattatacagcctttcaagtcactatagaatataacttcagtccattgctttaaagttttgctaaaaaaattgatggaacaactttaaaattaaaaccatcaatattgtttcgtgcatttcagcaatggtcacttgatattaattgataataggaatgttggagctactatgataatctaaaacagtcttatatcccttaatagctcccagtgtgacaacaaccgaggagagaagcagtatttccaaatatattcagtgatgatctaagtctgtaacttataccactttctttatatttcaatataacaacttattcattggtgcaaaggaaacatccagtatgcactattcaacctgctgattaatttactagcctgttaactcaagaagccccatatattcactcattcattcagcagttttctttgagttatcacggtttcagtcagtattctaagttccagaggcacttgactaaagaagatgatagacaaaaactttgccttgtggaaattacaggttagtatgggaggcagacaataaaaacaacaaaaaaataagttacacaatattatagaggcttgtaagtacacgcaataaatttgaagcagaaattgagaattagctgcacgtattgagttgatgtaaattgtaatcagggaaagtctcactgagaagatggcatttgacaaaaaatttgaaagaagtgaagtgggaaactatgaggatatgtgtgaaagaggattataggtggaaggaatagccagagtagaagtcctgagtcaggaatgtatctcttgagtttagaattagcaaaggggacagagtgtgtctctggtggagggagatgagaatagacgaggtaggagagatgaccagaggccacatcatggagatgaagctatatgctcatggtcacccagccagtgacaaatactgatcattcttgtgtgccatgaatcatgttactcagactttctttctttctttttttttttttttttgagacggagtcttgctctgtcacccaggctggagtgcagtggcgcgatctcggctcactgcaagctctgcctcccgggttcacaccattctcctgcctcagtctccttagtagctgggactacaggcacccgccaccacgcccggctaattttttttgtatttttagtagagacggggtttcactgtgttaaccaggatggtctcgatctcctgaccttgtgatccgcccgcctcggcctcccaaagtgctgggattacaggtgtgagccaccgcgctgggccacatgttactcagactttcaatcaggtttttccatctaacattacgaatatattttagataattccatatgcaaatatactaatacagataactgaatatgctattaaaatatttcttttatttgtgaccctaaaagtttaaaaatttacttggtataggtataaaatgatttcttctatcttagatatgtaacaaaagatatttgatagagatggtttctgcataataatattattttaaaatatcaatatttttgatatacaaagaagactaattttggaataatagtatccaagaatacagtttataatgctcatctttcaagagagccctcatgtatcttactccagatattttgcacccacatggtaccacagttggtctggatgtcaaataatatatggcagaagtaaaatatgtcactactaagattaggttataaaatactgatatttgatattttcatattgcatgtgctctctctctttctgtctctttctctctctctctcccttcctctcactgttgctctcatcacccattctgtgacagccaagagccaccaaagaactgatgtctgccaaaacccatatgaaggatcttgcatacaggttcacaagcctcatttgagctttgaggtgtcagactcaccagctaacagtttgggcgcaatctcttagtttccagagccagaagttctcacgtaagctactccaagaatttcaatcttgacccacagaaactgtaagtgaaaagaaatatgtgttgtcttaagctcctatactttaggataatttattattcagcaaaagaaagctgatttttttcggaaccaaaatttctgtttggaaccaaaagtgagatgcaagaaaacaaacttgaaatgtgagagtgagtttgaaactagaaagtagacctggaggagagttacagtgaaagcccagagtgctttgagggaactgttaatggaagacttacgctcttggataaggctgtgcataacagggttgcagaaaagtgggacaggcattattagaaattagagaaaggagattgttttaatataatggcagagagcatagcaataccatacttaactaaagttaattagcaagtcataaatggttgaccaggctaatgtagtcatatactgtgacacatttgaaatcttattctgctttgcaagctaacagtggagactgccacaattccattgatgctagcagaagctatccaactcctaggtcagagaaaaagagctttttttcctcaaaatactgaatgcaccacaagtttcacatttgcttcaatgttccttgttcctcaagtcccaggggtgatgcagtggctcagggtgatgttgcataggaagagagttttgtcacagggaaagaactattttaaaaacaaataaacagacaaaaacaaaaccaaaaaactccctatcttatgagagaactgttagcaaactgtggtagacaaaataacgtttcctctcaaaaatgactttgtgttaatgtctagaacgttacttgtgaaaagagatactgcaggtgtaattatgttcaggatattgagatggggaggttagcctgaaatattcaggtggatacaaggtaagaagaagggtcctcctgaagagtgaaagagagaaaggagaagagtcagtgtcagagtgatgtatcatgagaaagacttgagtggccattgctggttttgaaaatggaaggagctgaaaaaagcaaaacccaaaaaccaaaccaaaacaaaaaaaccaaacggcttttccctaaagcctccagaaaagaaggcaaccccgcttgtacttggatttcagcccagtgagagccattgtggacttctgccctccagaactgtaagatcatacgtttatgttgttttagatcaccaagtttatggtaccttgttatagcagtcttaggaaactgttacagtctacagtacctagaagttgtgtgctgctctaacaaattaaaacaaaaaaaaaactatgaaagtggctttggaattgaaaaatggcctgaggctggaaaattttgatgatcgtgctagaaaaagcttagatgggcttgtattgactggtagttgaaatacaatcatttaagactttgctggtgaaacttcagaagaaactgatgatcatggcacagaaatcatatgtcaccttagagaattgctaaattattttctgcagactatggttaaaaatatggaccttaaaggtattgctattgagggctcagtgagaaatgagaaatatgttattggaaacaggaggaagggaggtacttgctatatagcggcagaaagctcagtgggatagtgtcctacaattatgccgagagcaaactttgtaaaagaagaacttgaatagttagctgaagagatttccaaagaaaatgttaaagctgtgatctggttgcttcttggtgcttatagtaaaatgtgggagaaaagacatacactgagggaagaattatgaagtagaaagaaccaaaacttgattatttgagaaattctgagcctattcagattgcaaaagatgctaaatttagaggttcactgtcaagaaagcatactttaaaactagcatttgactggaaagctttttgtaagtgcctaagaagaaactaatagttacagtgttattcacatagaagtctcttgaaagatattagtgaatcagagactagcacagctatctggaagaagacaggaagagaaacaaatcattcagaaaatatctgtgtgatagtatcttgactaacagagcgaattcccatgacatatacaggagacttacaagggttttaacaaatttttaccagcagaaactctaccagctgagatagaaagagactgagaaaggaagaaataataagagaatgttggtcccaaaattctacaagcacaaaatggatattacttagctgagaacatgtcctgcatttcttaaaaagaagaggtggctccaatggcagagctatcatcctctgagcaagtagagccaggaatcaaagaacattattactaggtcttgagaccttgtgtcatttgcccaactggatttaaaaattttggactgttgaatatttgtttttctttcattttctcacattttaaaaggaaatatatataactgctattttatcctcaactactattgcatgttgggaacagataacttgttttctagtatcacaagcccactgatgggattaattacatccagagctttattcatacctgatttagatgatttagagagtaagatttgagactttgagctgaacacacatagatgagattttggatttaaatttattcattaattggttgaaaatttggagatgttgctgtggggtgattgcattttgcaagtgggatggaactgaatctttggagtccaaagagtggagtaccataagcagaataatggcctctcattgatacccatgttctaaactctggaacctgtgaatacgttatctgtcttacatggcaaaagtaacttttcagaagtggctaaattaaagatcttgagatagggattatcctaaattattctggattaccctgtaattacaagggtccttataagtgaaataggaaggcagaccattcaatcttagggtgagttagtaagagaaagactggatcagccatttatggctttgaagattcaatggggccataagccaaagaatataagcagcttttagaaggtggaaatgtcaagacaattgattccccttagaggatctagaaagaaatgcagctgttctgacatttggattgacattttgattttggcccattgaattaaatttctgatttttgaccttcagaaatgtgagataatgatgtcagagatgcagatataccagagactatttatagagaatcatcttccaatgagatttccaatcagtgttgaacatgcttccttgtttcctgttgttgcttatagtaatgtcagaggagggagataaaacaaaggaaggactggtaaacaaaatattaacacttgatggttttgaacatttctagtgttttcatttcacaaaggatgataactttctgaggaaagataaagttacacatactcctaggaaaacacagaccaaagataaagctgaagatgtgactaaaacatctttggtggagacctcagaaaaatcaaggttgtatatcagacaaaaggccttctaaagagataaaatgtgtgcctcatatttccttacagtcaaacagtagagcttttaagaaccataaggtcactgtccctcagccttcccagatgaaatgcaaagtaaagaaggtctcatccccaagagatcatgaacatggattttatctaatggtacagatcttaataagatttacacactttttaaaggaattccagattgagatatgataccgtattgaactgaaaaggacaaagataacacaacatgaaaagagggcttttgtcccacaaaattctatcagcagcaagtgagtgaaaagcagcccatgatacctttcattaaaaaggaaggaggactctggccagacgcggtggctcacgcctgtaatccgagcactttgggaggccgaggcgggcggatcacgaggtcacgaggtcgagacggtcctggctaacacggtgaaaccccgtctttactaaaaatacaaaaaattagccgggcgcggtggcgggcgcctgtagtcccagctactcgggaggctgaggcaggagaacggcgtgaaccccggaggcggagcttgcagtgagccgagatcataccactgcactccagcctgggcgacagagcgagactccgtctcaaaaaaaaaaaaaaaaataggaaggaggactcatagggtggaaccaagagcccagaaaaattatttgttggccttgagatataattacagaatttacagcatgtgacttgctgaattttagatatagctttgcacacatgactactttttccttcctttttaaaacatgttatctatgccaatcacatcattatacattgggtgcattaagagcagacaactggtcacgttagtttcagagatgaagaaaaactgtattcatggggttgtacttaagaaaccatacccaaggagcctcattcacttctgtactgagtgtagatatagatccggacttgagctgatgctgtaatgggataagacattaggaggccctttatgaggaggtaattgtatttcatttatgggagaaacatataattgaaagcaggaaggaccggaataagaagcctccaatatagcctccaaagtttcctttcaaggcattcacatctttaaagagtcccctctcatattttaccagggtttgtcaatgtgctaaatagcacgtggcagaatattgctcgtcttctctctctctcttcctctctctgtagttttctatctctcattactctttctagtagaaatgagctgtcatttttggagcagctgtatgaataggatcatatgctggtgagtaactaacattttcaggcacagcttgtgaaactgtggcctgccagccctcaggtgggtgatcatggaagcagattctgaagctgcagttagatcttgagatccttgctgctccagaggagagctgagatctttttacaagcgctgagctaaaaccagacagctcagctgctgctagattccttcagaaattgggtgagataatagtttcatggcaatttcctaagcagtaatataatacttacccagttttgtttttgttttttttcaaattagcttactttgaaacaacgactatcactttaagatataggtaatctcagtcttatagaaaaggtaaaattcaaaatatctttttaaatgataatattaaatatgataaatatgttaaatgaataaaatttagggcaaaactcaatccaatgtgcagcatatttttaaaaagataatgtgtaaaattcactctaaatagctgtgaatgccttctgcttatactttttatttgcaagcatttattttgtactgctgattttgttcttcaactgtgaattaaaaagtaaataaacagtaaactgctgactacatgaaacattacaaatatgacgtctttctgcccttgcctcaaaaagcggtaaaatatacctagttttctgaacatattttctattcctagtttgaattttaaagaaaaagataaatttacatgaaataacaaatcataataaaaattaatagttttaattaattggaaaatgcagtctggaacataaaaatagaatgactattttattataatttatcatacagttatactacaaagaaaaagcaacagcgttaattttaaaaaggcactttttctctgtgataatttatttgagtatccttattcttgagtataactttttaaatgtgcaatttacaaagctctgcaaaatgcctcatttatacaggctcatgcaaagctctggataattgttaagcaagattcttctattttcattaccagatatcaattcctttgtctatttgatgccatagtttcattaaagctgtttttactgcatcttaaattcactacaatgcaattcagttgtctcatttaagatagaaaaagtatgatctggaaatacttaagtgacttactggagcacaaatgctatttactgtcagaagaaaaatttgaattgtcattacttaagtttaaaacttttgcttttaaaagttattcagtaacttagccacttctttacacatatccatacttttttagatatcctatttcaataattcttgattgctctaaaatattgtcattgctttgtagtttcttgtatcttaaacaataatactaatacattttataattgacacatgtaaaaaatacgaatcagaaagcaattaaaaagaatggaatcattaagtcttcatcatttaaaattctgttttctgtgtttttcatttttaagtttctttattaatgtggaaaagctttgatttcttcctttgtttatattttaaaagattttttttgcaaagtaaaatatcgatatgtgttctgattttacatgtgctatagtttctatatttaataattaaataatgaggaatatgttacaattctaatgttttcaccatattcttactaaatatcttccacctgtatatatatgtaaaagtatatatatatattttttttgagacggagtctcgctctgtcgcccaggctggagtgcagtggcgcaatctcggctcactgcaagctccgcctcccgggttcacgccattctcctgtttcagcctcccaagtagctgggactataggtgcccgccaccacacctggctaatcttttgtatttttagtagagacggggtttctccatgttagccaggattgtctcgatctcctgacctcttgatccgcccgtcttggcctcccaaaatgctgggattataggcgtgagctgcggcacccggcccacctgtatatttttaattacatgtaatttaattgcctgaaataacggttgtatcttattgtacatccttatatacaatcaggttcttatttttcttagtctcttactttcttgccgatgcctgctccaaatataagttttaaaaatacatgtgatgtcttaaaaataattttattttggcaataccaagacctactccaagtctttgttgttgtcctaggtgtttttttttttttttttgtataagtttctctatttactttttccattttatttttgaattaccttcaggattaaaatgaaacgatttgaataactttatcacaggccatgagaacttaatgtgaggctcctgtggatctgaatgggcactcctcccacccacctagtttgcgggtccagtatagatagagactgtaagacagatgtgtccctccctgcatctctctgcttgagggtgtgttttagccactagaatgtagtcagatgttcctgcctgccgcatgtgcagagtttttaatgcctaggagtgtccttaaagggatgcggtttttgagctggtagattaatagcccagcttcttttctgtaaagagtataatagtggtatcgagttccagtttttcgtgaagacaacttgccagttatgaaactctatgggttttcctcccttcctgcatcattttcagactccctgcatatttcttggaataacttctcaaataaaaatcttaaacaccaattgttgtgtcaggttctacattcggaagatcttaaactaggacaactaatatgcttcaaacttccaatgataatgtatagacaagaagacagctctgtcctctaggctgtgcttttagtgccaactttcttaataacatcacctattctgctgacactcactctggaggaataaaactttagagcccctggctaaacaggatctgagaggaaggtaaaagatcaaggagacagaatcattatgtcggcatggcaatgcggtagcttggaaacctttaaatgttttagcctgggaaaatgtattttgaatcatcaactaattttggagtatttactcaaatgtagagaataaaatgttttctatttatatgaggacatagaagggaattcaccagaatttcaggatttgtttgaaagtgaaggggatgtttttgttaattagaactcagagttcaaaacagctcctttcctgagtggtctctgagaatcaagtagaacacaattatctgttttggaaattttctcttgggtaacttgaagagttcatctagaacacatcttccttcaaatctataaaacattgtaatttttaatgtgtgtatattatcaactatagtaaatttaagaaatatattaccttaatatctgcaaattaaatagtgactgactcatggttccaactttctatccaaagcaactttcatgtgcatttcatgagttcatcattttgcagtaatatcatactgtgtaaattgagattaaagtgtctaaactaagccaagtacttatatttatgcagctttaatgctatctgtgctttaagattgtcgtgaaaaggcaacatgattatcattatgcctgtcatacctattattgtcatcattattagttttagctcagtagttccacatttatttagtttcttgcaatattttgtttcttaaaggcataccatctatgctgtcaatcctacatacaaatagcgattttacgccaattttagcatttagctgtataaatcaatgtgttcctagtgtctttttttaaaaaaaaaatctacctttcctcagccccctgccaagaagcctcacttgcattggaatggaagtaatagcccacatttaatattaaaaatgaagcaacttatatagttttaaaaacttatatttgaggaatagaataaattaaaatcaaatgtattttaattcaaattcaaagaatgatttctagcattcagctttaaaaaaccacttatgaaaatatctttaatcttgtaaagaaatattaattatagaatcactgaaccctttgaaagctgatttattttgctttcctctttataagttagctttcagagaactaatgatttgaaaatattagaatagtgtagcatataagctttttacctttaaagacatttaaagtactaattctatattgaccaaatgttttctaaatgtataggtcaagaaaaacattcagataattttattataaatgatgtgttaaagtggcattttgaaaagtttactattatgaaatgagtattgatagatactgtcatcttttaagaatagtcatggatgagatcataaatgaatatgtcaaagtagttatagaattccaataaaaacttctttttcattagtttactaaataatgggaagagattcaatacatggaaaggttcctatttttatgatttaaatcaagaatttctataaatatgcaaatacacaaatactatgattatttcttgaaaatcatttttctttgttttgtagaatagttaaaattcaagcaaacaccaaattcaaaatcaaacgtttaaattttaataatctcttatggcattccatatttaactctcagaaattacatctttctaccatgatgagttgaagaatatactgaagaaatttatctaggcagaataaaataatactgtgttgctggtacttattgggtatcacttacaagtaatatattagaaattcattttccacagacacaaaagcaaatatacacaaacatgcagagatgcttaaactcaacaagattaaaactagagtaaaacaaaacttaaaccaaatggagcaattctttacatggttaatgtgggaaaaataaaaatacactccatattttacctgaaatttttcctacaatatcaataataattattacttttttctttctcaatattttagtattttacacaaaactaaaaaacatactagctaaattaatgaataaaaattaaactcattcaaaattcagcataagcaaagttcttcaatatttaatagtttgatttccacttctagggtgaagcaaacactattacttgaccatccagttaactcatttttctttttattttctttctttcttcctttcatttatttatttatttatgtatttatttatttaattatgagacagtctcactccattgcacaggttggaatccagtggcagtatcgtggctcactgcaacctcaacctgccactctcatgccatccaaccacctcagcctccctagtagctgggactacaggtatacgccacaatgcccaggtaaattaaaaaaaaaaaattgtggggacagggttttgccattacatgcatgaccagttctaaccattgttgactttatggagagtgtaaaaattttgatttaaaaaaaatgagagcagtatttgtctaattcaatttattttccacccttcgctttccccctttggataatgggctaggctgaaattatgcttggagttgtttcaggaatcttgaggcaatgagagaaaagttaaagaaacatagagatgtcaatgtggatctgaagtatcactgggaagccaatccaacctagtgtctgccaacctagtactttcttggagtcacttgtatgcctaaattttacaaacacttttactgcttaaagcattgtcattaatacataatgcttacctgaatgatactttaaagacaatcatgagttatatttaaaagcaagagttataaattataacaaagaaaacataacaattacagttacggattaaataggtatattttcatttttgacaagaagcaaaaggataaaataaagaaaaagactgcaatcaatgaaagtaaaaacagaaagataatcatggttgtttaaagattaacaaaatggacaaatctctagccagactgattaggagtagagagagactgaacaaactgccaatgtcagtaatgaaaatggggtatcgctacagatcctagtgacattaaagagatgataataaatacaataaaaattaatgttaataactttgacagctttgacaaaatgggtacatactttgaatgataaaaactgtcaggccaggcatggcggtggctcacgcctgtaatcccagcactttgggagtctgaagcaggtggattacgaagtcaagagatcgagaccatactgaccaacatggtgaaaccccatctgtactacaaatacaaaaactagctgggcatggtggcgtgtgcctgtagtcccagctgctcgggaggctgaggcaggagaattgcttgaacctgggaggcggaggttgcagtgagccgagatcgtgccattggactccagcctggtgacagggcgagagtccgtctcaaaaataaaaaaaataaaaaataaaaaaaaagtcaaagttcagtcaagaagaaaagataatctgtaaagttctatatatatgggaaaaattggatttttaagttaaatatcttaccacaaaagtgaaacctgaaacccaaaaagcattaatgacaaactgtaccaaatacttaaggaaataaagagtaccaattctatatggacatttccagaaaacagaaaaagaggcaagaattataatctgttgtaaaaccaggattactgtgacagctgaaacagaaattccaagagggtaaatgcaagagcaacatactacaaggatataaatccttttttttgatacagagtcttgctctgtcgcccaggctagagtgcagtggcgcgatctcagctcactgcaacctccgcctccctggttcaagcaaatctcctgcctcggccccccaagtagctggaattacaggcacccgccactgcgcctagctaatttttgtatttttagtagcaacggggtttcactatcttggccaggctggtctcgaactcctgacctcttgatccacctgcctcggattcccaatgtgctgggattacaggtgtgagccactgtgcccggccataaatgcattttttcaaattaaaaaaaactaaatccagcaatatgtaaatatggcaatgcattttcaccaagttacatatataagaagcagctactatgcgtaaggctgagataaaacaccatgaaagaccacctctttactcctagaggtgaaatctggacttttttggatagggcactgccatggatcactggaaggcatggagatctctttggcaacgcacttcaggaacttgctagaaatccaccctctctgatgctagtgaaatttggtcatgggatcaggtctcctcagaggttctcagctgcaaaaccccacagcagagatatcacctatcagcaggtgataggagatgggtccttctggtcaccaagcactgcaaaactctaatgcaaggggagctgcatatgctgcaaaagcatggttctggaaataccatctgtgttatagaacctgggcattagagaaactgcacatgctagggtcttggtgctagaaactcactatttttgccgcaggactctagcgtgagagaatctgtacattctatatagcttggtactggaaatgtcatccatactaaggtaccctggcacaagagaagatgtacatgctctagaacgttggttttggaaatggaaaccttgctactactggaatttagtgcagtagaaactgcatatgttatagaaacttttccacaataaaagatgtaattcaggatcttggtgcaagagttactgtgtatgttgcagaaacctggtgctggagaaattgcctatgtgcagttgctgagatctgatgatccattatatatcgcaagtgctcagtggaagaaattaactatacaataggagatgggtgctggcacacactggaaccttcatgtcctcattcaatgtccaccagtgctttttactaacaaagattaacatcttaaccatcttaacagctggcaaatagaaaatatttaaattgctgtgatacactctcacagagaagaaatgaaagatgaatatgagatggaaggcaaaatattgaaaacggcaatactagtagagaacaactgcgacagaacaaaattaaaattgcatttataaaaaataagaaatttgtgggaaaaatttgcttacagtctgagcaagtcttttagctataagtttaaagtatttttagatcaactgcaaaaggcataaataaattaaaaatacagtgttttcatggattgggatagaaatatgtttaagctgtaattctttccaaatttacctatgaacacaatacaatcacccaaaatcataatatgattttgtacaagttgtcaagctggttatttacaaaaaaaaaaagtaagtggctcagcatagcaaaataattttgaagtaaacataacaaaattgcaggatttacgtcatctgaatgtataatttcttataaagttacaattaaggtagtgcagtgctggtaaagaatggacaaattggtctttggagcagaaaagacagtgcagaattaataataaacaaacatacagataaataaaattctgatattagatttcactgaaattattattttaaatactgctaagaaaagtaatgacaagccacagactagaagaaaataattgcaatacatgtatcttatggagaacttttatttagaatataaaaagagttcttaaaactcaataataagaaggcacaagacactagtaaaaggcaaaaaaaatgaatctttaaaaatcaattggcagtttaatgggaacaacattgaatctgtaaattactttgggcagtgtggccattttcacgatactgattcttcctattcatgagcatggaaagtttttccgtttagtttgtgtcctctctgatttccttgagcagtggtttttagttcttgaagaggtcctttacttcccttgttaactgtattcccaggtattttattctctttgtagcaattgtgaacggaagttcattaatgatttggctctctgcttgtctgttgttggtgtgtaggaatgcttgtgatttttgcacattgattttgtatcctgagactttgctaaagatgcttgtcagcttaagaagcttttgagctgagatgatggggtttcctagatataggatcatgtcatctgcagacaaagacaatttgactttctctctttctatttaaatatcctttatttccttctcttgtctgattgccctggctggaacttccaatactatgttgaataggattggtgagagtgggcattcttgtcttgtgccagttttcaaggggactgtgtccaatttttgcccattcagtctgatattggctgtgggtttgttattattttaaggtatgttccttttcaatacctagtttattgagagtttttaatatgaaacaatgttgaatcttattgaaggtcttttctccatctattgagatgatcatttggtttttgtctagttctgtttatgtgacgaattacgtttattgatttgtgtacgttgaatcagccttgcatcttgggaatgaagctgacttgatcatggtggataagtttttgatgtgctgctggattcaacttgccagtattttattgaggatttttacatctatgttcatcaggtatattgacctgaagttttcttttttctttctttctttctttctttctttctttctttctttctttctttccttccttccttccttccttccttccttccttccttccttccttccttccttccttccttccttccttctttctttctttctttctttctttctttctttctttctttttttttttttttgtatctctgccagattttggtatcaggaagatatagaaccaaaaaagagcctatgtaaccaagacaatcgtaagcaaaaagaacaaagctggaggcattaggctacccaacttcaaactatactacaaggctacagtaaccaaaacagtatggcactggtacaaaaacagacacatagaccaatggagcagaatagagaactcagaaataagaccacacatctacaaccatctgctcttcaacaaacctgacaaaaacaagcagtggggaaagtgttccctgtttaataaatggtgctgggagaactggctagccataggcagaaaattaaaactggaccccttccttacatcttatacaaaaattaactcaagatacattaaagacttaaatgtaaaactcaaaactataaaaaccctagaggaaaatttaggcaataccattcaagacataggcatgagccaagacttcatgaaaaagacatcaaaagcaattgcaacaaaagcaaaaattgacaaatggggtctaattaaactaaagagcttctgtacagcaaaataaattgtcatcagaacaaacagacaacctacagtatgagagaaagttttggcaatctatccatctgacgaaagtttaatatccagagactacaaggaacataaataaatttgcaagaataaaacaaataaccccattaaaagtgggtgaaggacatgaacagacatttttcctaagaagacatttatgtggccaacaaacatgataaaaagctcgacatcactgatcgctagagaaatacaaatcaaaaccacaatgagatatcatctcatgccagtcagaatggttattattaaaaagtcaagaaacaacagatggtagtgaggttgtggagaaacaggaacacttttacactgttggtgggaatgtaaagtagttcaaccattgtggaagacagtgtgtgattcctcaaagacctagaaccagaaataccatttgatccagcaatccaattacttagtatatgcccaaaagactataaatcatacaactataaagatacatgcacatatatgttcattgcatcactattcacaataggaaagtcatggaatcaacccaaaagcctattaatgattgactggataaagaaaatatggtacatatacaccatataatactatgcagccataaaaacgaaaaagatcatgttctttgcagagacatgggtaaagctggaagccattgtcctcagcaaactaacacaggaacagaaaaccagacaccacatattcttacttataagtgggagctgtacaataagaacatacagacacagggagtggaacaacatacattggggcctgtcacttggtttaggggaagagagagcatcagaaaaaatagctaatacatgctgggcttaatacctagatgggccgggcacggtggctcacgcctgttatcccaacactttgggaggctgaggcgggaggagcacgaggtcaggagatcaagaccatcctggctaactcggtgaaaccccgtccaaaaaattagccaggcatggtggtgggtgcctgtagtcccagctactcaggaggctgaggcaggagaatggcgtgaacccagaaggcggagtttgcagtgagccgagatcgcgccactccactccagcctgagcgacagagcgagactctgtctcaaaaaaaaaaaacaaaaaaaaacctagatgatcagttgataggtgcagccaatcaccatggcacacattcacctatgtaaaaaacctacacatcctgtacatgtatcctggaacttaaaataaaataaaataaaaattaaattaataaattaaattattattaattaattaaattattaaatcaattgggacttggaggcaaagacgggaggattgttttcaggagtttgaaaccagcctggggaacatggcaggacctcgtttctacaaaacacaaaatggtagctgtgtgtggtaatgcatgcctgtcgtcccaactactttgaaggctgaggtgggaggattgcttgagcttagaggattaagactgcagtaagcaatgattgcaccactgtactccagcctgacaacaaagcaagactctgtctcaaaaataaagaaatacataaaataaaataaagttgtaatatagtaatacaattaaatcctactctacgataaaaagaagaaataactgttgcacttaacagtatggattaattttagtagcatatgttgaatgaaataagccaaacattatttatatgaaatttgaaaagaccaaaactagaccaaagaaccccttacattggagaccaaagaacaaaaagcaaaggagttattgcttgggcctaggatggagggactgactttatttggcaggtggaaacctttcgagataacattacttgggtgctaatattgaatcatacacttaaatgatgtgtagctataaagattattaacaacaaaaaaaaacacttcctctgtcttatgatgaagattcctttacttctcaaaatgcccttcatgcattgctcagtcaatcatcaacgtagagtgccctttgtttatcctctgtcagggaaggagctttgtactgttagatatattttaattcctttaaaattagagctgtgtttttctcagttagggtttactataaggtcttaactagcaaatatgaacattagttattccaggagaaaacaacaaagataaaaaagaaacaatctaaagaatttagatataaaattttaatttttcattaatagtagcaaaataaaagaaaccctaagtagaattcagtacactacatgataaaaaggtagaccttatttaatgaaaattaaagtgtcaatgtttaaaattacttttgttcaatttcatttttcttaataataaaatgtagaccttggatagaaccattatggtgtgctcttcacatatgagaaaatcaatatgccttcaaacaagagcacatctaaactattttctattaataattttttacattttcattagagagttccagtaaaaacccgagtttataattatcattttgcttgtcatcatctatctttgaataatactatttagtttgaaaggttaattggctatgagccatctatgatataatgaataatttcaatcacctgacttgtatgctacacttagttttctgaaatatattatctttcacttctgtcagtttgcatagttctaattctttaataatccactgaccagaaacagatatgttaactttaaaacacatggccctaacactgttttaaaaatatgttcatacattgataagtcaagctttctataatatgttgaaatatttaaatacatatcttagtcagacacttttgtgtttgttataattcttaaaagaataaaatgtttttatactttattgaggaggtaaatgctaagtatctgagacattcaattatttataagaactcattctcagagacacaaaaatgctatcaagcttaaatttctggaactagtaaatgtttctatgctttatgaaaattttatggattaatgactggagagaatgctaagatcctcatgaaattgtagaactgggaaggaggactagtgctattatagaaattctctaagtaaaataatttgttccttgagttgacaggaagtttagtgggaaaaagtggaaagagttaaagtaggcccaatcaaatacgaaaatttaatgcatgaaaaggtagtgctatttattgatatcttaataaacagcattgacacaaaaggatagccattagcagtacaataaaattagatccataacacattccaaacacaagagtgaatgtcaaaatgatcagccatataaacataaaaaaatgaaataataaaatactggaaaatacttaagtgaattccttcatactctgggtataataatattaaactatgcttcaaaaactgggtgcagaaaagataaatttgattaattcagtaatattgccaaaaacttttacatgcaaaataacaaaatcctaagtaacttcaagagtaaaatgagaaactgaaaaaaagtatatcataaaggatttatgccattaaataacattgttatttaatcacctcccacccagtagcagaattagtagattttatgatagttttatttttaattttttgaggattgcatttctaagtagcttttaaaaattactggaaaaacggaatgaaaatccaggagaaaaaatatgcaaaaggtatgaacagataatattaaagtaatataaacattgccttacacatgtgcaagacgtccagtttcatgcaataagagatttacaagttaaacctagattgaaacatttttctcacctattaaaattacaaaaattcaaaattttgatagaatactgtgctggtaaaaccatgccaaatagccactcatatatggccaaagggaaggaggaatggtagaatttctatggctggaaatatggcactaagcagagaaactgatgcagtaagcccactactaagaaattccttgaaattacacacctaaaacaatatgaaaataatcacagttattaattgtagcatcaactataaggtcacactattggaagtaatcttaatgctcacacataaaaatagctaaataaactaaggtatagccacacaattttttacaatgcagagatttaaaaaaaggaaaaatgtctctatcaactgctaaggaatgatagcaaggatatatattgttaagtaacaaagaggaaagtgtaaagtagtgtaaatagtgtgttgccatttatagtaaataccttggcaaaaataagcaaagaaatgataaagcaaatgttataaatctggttacctaaagagaatgattgataaatgtaagaaataatgggaaagggtttttaattttgaaattatgttaccaatttatatatttcagtagatataaatgttaagaaatgaaaaagaaaattcgaaacaatgcaaaaacaaaatatattaaattgataacataaatacattgaagaaaaaaataatacaagtaactttgacatgtatttgaatccaaagacaaaaagaaacttagatattttgaaaaggaaatttgtttgctctcatatgtttgttgcaccactgtttacagtaggtaagatttggaagcactctaggtgtccataaacaggtgaatggataaagaaaatgtaaacatccacaatggagtaccactcagccataaaaaaagaatgagatccagtcatttgcaacaacatggatggaactggagatcataatgtaagtgaaataggcacagaaagacaaacaatgcatgttctcatttatttgtgggatctaaaaatcagaacaattgaactaatggacacagagagaggatggttaccagaggctgggaagggtagtggaagattgggaggggagatgaagatggttaatgggtgcaaaaaataagaaataaaaaagaatgaataagatctaccatttgatagcacaataaggtgactatcatcaataataacttaattgtatatttttaaataacttaaataatgtaattggattatttgtaattcaaagtataaatgcttgagggaatggataccccattctctcattctctatgatgtgcttatttcacatagcatgcctatatcaaaacatctcatataccccataaatatatatacctaatatgtatccacacaaaattaaagaaataaattttgatattttctttaaatatatttaattaaccaataaagatcatatatattctgattactcagtgtgataatttaatatatacaatattgagtaataattatcaaaacaaataggggcctgcctcttaaaaagaaagatattttgaacccaacttcataggtttgttgttcatagtgcagttggtataacacttttgaaaatatattaaacaaagggtaagtatattaatatatttgagaattctcactgtgggaaatggagaatacatgtatgtaatggcataagtttagatggatattagaagtagcagaataaacccataatttttattttagagctttattgagatataatgcatatactcttcacccacttaggatgtgcaatacaatgaagtgttctcagagttgtgcctccatcatcacaatcaagtttagaacattttcattagccccaaaagaaactccataaccaataatggttattccttatttctctaactcctccaccgccagttctcctctccccaaccttcctggccttatacaatcacttgtctacattttttctctatatgtttgcatatctaaacatttaaacaattattatatctaactttaattgtatatcctttgaccaggatcacccaatccctctcctcctacttagctcagcctctggtaaccactactcaactctctgcttctacgagttccactttttagattccacatatgtgagatcatgtggtatttctgtcctggcttatttctcttagcatgaaatcatccaggttcattgatgttgtcacaaatggtgggattttgttcctgtttgtgaccgaatactcttccattatgtaaatataccacattttctttagtgattcttctgctaatagacacttaggttgatttcatgtcttggttattgtgaataatgctgcaatgaatgtggaaatgcaggcatcccttctatatactgatgtaattttccttggatttatatgcagtactgagggagtggattgtatggtagttctatttttacattttctgaggaaactccatgctgttttccctaatagcactaatttatattcccactaacagtgacaattttggcacattatttacaatatttatcttctgcctttttgataatagtaatcctagtagaaattaggtaatatttcattttggttttgattttccatatcctaatgattatgatgttgagcatattttaatatacaggttggccatttgtatgttttcatttgaaacgtatctattcaagtcttttagccatttttaaaagggttatttgttttcttgctattaagttccttatatattttgaatattaactccttatcagatgtatattttgcaaatttttttccattttgtagattgcctcttcactgctgtacagaagcttttttcactttaaatagtataatttgtctaatttttacttttgaggttttaaatagaaaatccttgaccagcccacacgaatgtcgtggagcttttccctagtagctttcacagtttgggatcttacatttaaatatgtaatccattttcagttgatttttgaatatggtgagacatagagagtcttgtttattcttctgcatgtgaatatccagttttcacagcaccattttttgaggaggctatctttttctcattgggtgttcttgccagatttattgaaaatcagttggctataaatgcacatatttatttttgggctctctgttctgttccattggtctatgtgtctgcttttatgctactaccataatgttttggttactatatctttatagataattttaaagtcaggtactgttatgatttcagctttggctatttggggttcttttgtgatttgatactaattttaggatttttttttcaatttatgtgaagaatgccattggtgttttcatgagcattgcattaaatctgtagatcactttgggtacactttaacaatgttcattcttctatttaatgaaaatgaaaaatctatatatttatgttttcttcaatttatttaatcaatgatttatagttttcagtgtaagatccttcacctccttggttaaagttttttctagggttttttttctaaatagctgttgtaaatgaaattgtcttcttgaattctttttttcagatagtttactattagtatatagaaatgtaactgattttttgtgtgttgattttgtatcttgcaactttactggatttatatattaattctaactgttttctggtgtaatccatagagttttttatatgtaacatcatgtcatctgcaaacagataatttacctttttaatttctctttcaatcccttttatttctttcttctgtctaattgctctggctaggacttctagtactatgttgaatagaagtgatgaaagtggacatccttgtcttgtgctagattttagaggaaaagctttcaacttttctctgttccgtatggtgttatttctaagtttgtcatatatgggttttattgtgttgaggtacatttcttctgtaactaattgttgagagtttcttttattttcatgaagggatgttaaattttgtaaaatgtttttctgtatgtataaaatgtttttctgtatgtataaatcatatttctagcctattttatttatttcattctgatctttattatttcctttcttctagtaattcgggatataatttgttcttgtttttttttttggttctctgagatgtgaattttgtccttcattctattaatgtggtgtattatgcttattgatttgcatatgttgaactatccttgcatccctgggatgaatcttacttgatcatggtgaatgaatgttttaatttgctgttgaattgggtttgctagtatttggttgaatatgcttgtattattcatgttcagcaggaatattagcttgcagtctttactgttgtggctgtgttccttgtctggttttggtattagggtaattctggaatcatagaatgagtttgaaagtatttaatcctcttaaattttttggaatagtttgagaaaaaatagtattaattgtttttaaaaatatttggtataattcagcaatgaagataacactattagtttttttgcgttttttttgtttgtttgcttgtttgttttttgtatgggagttttttaactacttattaaatttccctacttgttactggtctgttcagattttctgtttcttcctaattgaattttggtaggttacatgtttcaaggaatttatccatttttttaggtaattcatttgttggtgtataatttgttcatgatagtctcataatcatttctattcctttggtatcaattgtaatgtattattttcttctgttattttatttattagagttttctctgtttttctttagctaaaagtttattaattttgtttatctttttaaatactaactcttcattttgttgatattttgtatcatatttctagcccattttctttctttctttctgactcttaccatttcctttcttctattaatttgaggtatagtttgttcttgttttttcagttctctgagatgcaatgcttgtttattcaagatcttttttttctttttggttgctggaatgtattgctatgaatttccctcttaggactgtttttgccatattccgtaggttttgatatgttgtatttacattttgtttccaaacattttttgaattttccttttaatttcttcagtaatatagtggttattcaggattacatcatttcatttctatatatttgtgaagtttctgaaattcccctcattattgatttctagttttttaaactcctttaaatttaagacagagtgagactccatctcaaaaaggaaaaaaaaaagacaaaagaaaaaagcaaagagaagaaaaacttcagccaaattaaatttaaaggagtttaattgagcaatgaaccattcgcaaatcaggcagaacaagtttgtagactaaaaaaggaagtgacatacagaaatcagaagtgaggcacagaaacagctagatggttatatgttggcatttgccttgtttgaacacagtttgaacactcaacagtctatgatcagttgaagtatggctgctggcattggctaagactctgctattattacaggcacatactcctaagttaggttttcaatcttgcctacctattaagtatccacaaggactcagagataaaagtatggagtctttctcaggccatacttcgttcactttaacagaaagcatatgttaacatgtgtggaatcattcctttaagtgttctttggttaaaacaggaaaaccatataactgctcattctccttttggtgccgtttttatgcaggcattttgacaactgctatctttcacattttacctacaccaaaaatcagtttctttgtttccttaagaaatttacttactctctgtaaatttgaaaatttgatctttcttctttcttttctttctctctttcttttctctttctttctttttttctctctctctccttccttctttccttcctccgctcttcgttcctttcttttcctttctttatttctctctatttctctcttcccacccctctttttccccctctctctgtctctctctgtaaattgagcttatttaaagtttttttttttttaatgtaatctgtcttcataaacctgagtaggtctgaaagttcagggaattgtttttaaaatatcaagtgactttttcatttgatgtgcatttaaatgttttctggggtgtaaaattacaatcttcgtggtcatttgtattcaccattgacatactagtaacttactttggctgaggcttaggcttcatttgccgatggactatagacttttaattgagagcatgatgagaattgtttttccttcttttctttgttttaagacaatgttttatgttttcccactgaatattaaaatttgtatatctagacatctcacaccgtgatttctcccagtgaaaaattcttaggagaaaagcattcatctcagttaaatgcttatatgacaaaaatttcaaagttttgaaattctgattagccttactgcaggcaaagtctcttagaagaaagactctatcctcatattctcaggtcaggagcaatgtattcataatatcaaggactatagagccataaatatggcttccaatcagttctggttctaatctgtcaaacctatttacacagaaaaataatgtttgataacggcatattaaatatgcttttgtttgcagactttttgtggcgttgtttttattttactctgtatttaaatttgtttctttctacaaattctccttttgtctttgaactataccaaaagatctaacctttcctgatttatattttataatattgattatttaaaggaattatccaaaatgtattcaaggatagagcttaatatgatgcttaatcaattttctaatagttttttttagtgtatacatggaattaaatctaagcaaccagtcaagaatctaatacatttttttctcttattttggtatctaattagctgttttcttttcttattgcaagagcacgctcagtaaaatgtagaatcaaaataaaatgaaattatagatataatgttgaattaaattaattacagatataatgatatattgcaggtcttcctctttgaagattataatacaagtgtaacaaatgctaataattaaattagaaaaaaccataaatacttacaacagagtaaaaatgttgtatcccatttaaaatatatgtgtgattctatatttacttaatgtagttacattcagtcatatttggtatatagtataaatctacctcctgctcaagaagtttcttgccacaatacctctcaatcatagttttgtaagagatgttcaattatcacactgcaactttggagcttccataaaaaaagattggcaaatataggagaagaatgaaacttaaaatctggaaaatgaaaagaagcatttaatttaaaaaaatcaaatttagtcatacaataaagttcccagaggagggagaggaagagaaaatataaagctatattaacttggagttagaggagtttgtggatttagaaggagccaagtgttgaagaaatgagatgttgatgagcgaaaggataagaggatacaatagtgggactttaactcagtatagcagtgagatttttcataattctagagaaatatgacaaggcaacttgagactttttggaattagtgcaatgagaataatctttctgccattattaaactgatatgtgcttattcctccgtttaaatcaggttcagcccagtggccttcacctcaattatttccccagggtaggagagtagaacatatgatttatacagctctagatataggtattactgggaaaagaagtgatttgttaaatttaacttgtcaaatattaaacccaggagactgactgaaattggaatcctctcaagttataaaagaccaaccacttttacctctgatatgaatcaactcatgtcatcactgaatgttttcattaatgtaatatcattgaatactaaaaacaaaacaaaaaaaaacaacatatacccaaccaatttattccaaggacatcactgacagaagaaagcagtgtgaaagtgcattgaaagggtagggccatgtttctatatccttctgttatcaccagaaatattaatgaatcaactagtttaattgaaggcaggatattttttcaaaacggagagaaatacttgatgacaaaaggtggacttctgtgtaagtgtgagagtgtgtgttgctgtgtgtttgtgttctcttatctaaataataaatgagttgctttggctctctccgacaacttctcatttgagttcttgcatcatggtttagtttgtggaatcataaaaattatttctgcaaatattcctctcctgcttctattttttaaattttctctggcatgtgcaattatcacaattccacaaggaactacatcatagttctaaaacattaatgacaaagggaaaatgttaaaagtgttcagaaggataaacatctattacctgaaaatgaataattatgacaaataactatagtagagtagtgctgaatgaagaaacaaaataatgttctaaatatattgcagaaaatacatttagaattgcatgtgtaataaaactatcacaaatatgacagcaaaagaatcaaatttcaaattaaaataagcacttagaaaatttacaaagtttttatttttagtggactttagaggatgttttttaagcaaaataagagagaaagctgggaagaaatcaacgtgatgttgttgggaagtaaaagaaagtagatttcttagtgaggtgagtgatcatgttgataaaatttatcagagaattaggaagagagagagagaaagaagaggaatttattcgtagaattagaaattctagaggattctacaccaacaattggcaaaaaaactgaggtaatagtattcagaaactgatttagaatttgtttcagggaaataagcaaggaggtcattattttgtttcaagataatacctagctagattttctatttgttgagctgtaggggtaaaggctaatgtatacgtttttatccactggaaaggcaaataatttatggtagaagaggtgtctcaaaatgttatggtttgggtcctgtacaacatgtcctgtatattaaaatttcatataatcataacacctttatatgtgatggttcatgcttcactttgccttccaaatcttgtgcaaaatttctcttctggtcaactctaaccaggttgtataggaaagaagattttgttgggtatctttctgattaacataaattaatattatcaagggagttcatgatgtaatttcatatcattctcaaaagtatgtatatatattgtttttaatactactgtatcctgcttatttaatttgggaattgcacttattggaaggtctacaatattcaatatttatatagagaactgtgctcctgttgttaattttaagacattttaaagaagtatcctgtgtacttttaagtgatttatattaatattttagacataattgtctttattcaactacatactgtgactcagaataattatattgttcaatcaaaccaggtaggttgtaaatgaatgttatgttttatgcatcaaacacaataatcaactaattataatatttcagaatacaatgttattcaacattataagtcatcagggagatgcaaattaaaccataagaagatactatttcatagccagtttaatccaaaagacaaataataccacacatgtctttgacgaggatgtggagaaaccagaatcttcatacattgctgattgtactgtaaaatggtgcaaccactgtgaaaaatagtttggcattttctccaaatgttaaaactaaaactaccaggtgatcagtaacaccatttctaagattctatgtatgtatatatgtatgcatgtatctacctatctatttctttttcttttttttttttttgggagaaggtgtctcactctgtcgcccaggctggagtgcagtggcgcgatctcggctcaccgcaagctccgcctcccgggttcacaccattctcctgcctcagcctcccgagtagctgggactacaggcgcctgccaccacgcccggctaattttttgtatttttagtagagacaaggttttaccgtgttagccaggatggtctcaatctgctgacctcgtgatctgcctgcctcggcctcccaaagtgctgggattacaggtgttagccaccgcgcccggctgtatctatctcaaagtatctgtgagtaaaaacatgttcagaaaaaaactgcatgcaattttttacagcagcattattcttagtagagaaaagctgcaaacaatttaacgtctaccaactagtttatgttagccaatatataatatgttcacgaaaaagaatattattcaaaataaaatggactattgacacatgctacctcatgaataaacttcaaaacacatggtaagtgaaacaagctagacataagcccacatattctatgaatccatttatatgaaatcttcacaaaaggcaaaagcaagacgaaagtagatttgtggttgcctaagtctaggcaggaaccagaatcaattataaattggcatgatgggagaaaaatgttccaaaacctatttaggatgatggtttaatcagagaaaactcactaaaaatgtttgaattatctatatgaaatggttaattgtatgatatctagaagatacctaagtaaaagttaaaaaagaattagaaaaatgctcagaatattttcatgttttattttattttcctttctaatatcatctggttcaagatggaaatgtgaaaagtttaaagagaaatgaaatcctgttgactcatcaaactcacccttatacctaagtaatttgctatacaattagtacattgaaaagaagacaccactgtctacacacgtaaatgaccaaaaaaaaaaaaaatacacagctctctgataatgctacaatattatcaacattgaatattggtgaatttgattgcatataaattatatctttataaagatggtaaaaaaaaaaaccacccacagttaaaagaacatgtgaggaacttccaaaaaatcaacaataaaataaaacaggtaactcaaagaaaaacaggcaaaagataaacagtcaggttatagacagaaaaaactgaataagtatcaaacatatgaagacctactcaactttgctaaagaaagaaatttatttttaaaacaacaatgagattaagatgtttctagattagactgggaaaattaaataaaatgaattatgagattataggaagttttaacaaaaataaagggaaaaacttcattatctaaggacagagttatctaatatagtcattctataaagttattgtgaagaacttagataaaatatgaatatgtatattataggtatatcattagtcatgggtgtggacattgattgaagtattgtttgtgtttaggaagaatggaagctggtttggagactattactggtaaaatggaaaagtaagatatggtggttgcactccataagctgtgaagaatttagatgtgttagcctataaacacagctgaacagctagtttcaaacaccaaaagaaaataaggcatagcacaaaatcatttatacgaattaaattacttgaacacattaaactaaacactgcttattttatttaaatagttactaactcgatgatatatgttaaacagcttagaatattgactatatggtgtagaatgggaaatagaggaaatgggcctaaaagggagtaactaaataatggcatgcattttctattgctacaggaaaaatgtaatgtaatttagcagctatgaacaatgcccattaattatctcataattctgtaagtcatacattcaggaggtttgcctagttccttaaagaagtttggtggcatctgcttagagtctcaaaaggtgaaaatcaaggtgtttacggggcttcattcgttactggaatatcttgaaggaatatcttttttcaggttctgtaaggctgttggcaaaactcagttctttgtggttttagaactgaagtcacatacctttgttgcctgttggccaggagctgttctcagcttctaaaagctggccaaaatacttgacttattttatttctctattttcgagggcagcaatgtggatggagttgttatgcttccagtctctctgatcgctccttatacctcacctctcctccactttccttttccaccacatctctctgagtccagtgaagaaatttctctgaaatttttcagcatataagaataacttctgatggcattagttatacctttaaattatcatttttagcatttcattgtatgtctaaaccatatattcttaaatttaattaccacagttttgcttttttcttgtttttgtgatttgataccaacccttgattagtaaagaaaatggaataaacttcttccttccaagaaacagcactttttttaagtaaagatggaatatgtgtaataggtgagggataactaaaacttgtcacataaggcaggtaagaccccaacaattgatctaagactcagtattcaatgacctattcattactgaataattaaaaagctacataaaaatcaatgctacctacaccttaaaaatacattttaattcacccatagattcccacaaccttttagacataaagagaaaatttagtattaactgagaaaaataacccactacctattgaattcaggtactgttgcttaaaggacagctacagaattctcatctcaatattttcatgtaaaataagtggaaatcaatagtccaaatatcctcattaagaaggagccactaataaacaatatatttataatttagataacatttcattcatatgcaggttttgaaccctgtggaatatttaatttgcaccaggctttccaagtacttaatttgtaagaattttttttcaatgggagttctaagatgacttttgaaataattattaaaatgaagacatctatgttttgcaaactatgaggatttagatacagaatacattctttcataagatccatctccattgtggatatgccatgtgtctttgaaagtacttgagagaaaggcattcccacattccgcatatttgtagggttattcaggaattagttctttcatgtcctcaactagaaatggaaacacttagggcattaccacattgtttacatgcagtttttttcattcagtatgagtgttttgtattttcaaaggaaagtgaaacaattgcgtgctttcccgtattccttacattcattggtttccttcaaatgagtttttcagtgtgttcagagggaactgaaacagaaagtttttatcacatttctcatacacataggatttttctgttgtataatttcatgttttcaaaaaaactcaactgttttcccacatttcttacattcctaggatttctatgaagtatgagttctttcatgtttacatacagaactagaatatctaaatgatttgccacatgacttagtcatagggattctctccagtgtgagttctttcatgtttacctagagagctgcaatagctgaaggctttaccacatttcttagtcataaaatttcagtataaattctgtcatgtgtttcaaggtaattgaaacaaataaaggctttgcaacattattttacatttataaggtttctctccagtatgaaattttgtatgtgttcaaatggaacctaaatgtctgaaggttttactacattttttacatcataaggtttctctctggtatgagttctctcatgtatttgaaggtaactgaaacaactgaaggtgttaaccacatttttgacatttatagggattctctccagaatgagctctctcatgtcttctaagggaatggtatagactgaaggttttaccacatttttgatattcatggggattctctccagtatgagctgtttcatgtcttctgagggaactctatagactgaaggctttatcacattttttatattcatagggattctccccagtatgagctgtttcatgtcttctgagggagctgtatagactgaaggctttcccacatttttttacaatcataggatttctctccagtatgtattctttttgacttagcttggaggaggaatgactgaagacttcaccacatttcttacatttatagggtttctttccagtataatttgtttcatgtttctgtagggaactagaaagagtaaattccttaccatattaattaaccacagaagatttttcaccattgtgaaccctcttacgtgcttgaaaataactaagacaactgaattctttcccgcatttcctacattgccagtttctcttaagtatgagtactttatgattctgaagctgactggaatatccacaggctttatgccatttccgacatttataaggtttttctccactgtgagttctttcatgcttttgaaaagaacttcaaaatctcaaggctttatcacctttcttctattcacagggtttttctccaatgtgagttactttatgcatttgaagtacatagagaaaattaaatgttttcccacatttcttatatttatgaggtctatttctggcgtgtgttaccatgtgtcattggacgtttatgagagagataatggtttttcccacattgtttacatttatatcacctcaccccacattcttcacgttcttatggtttgtgtccagaatgatctaagatgtgcctattaagagatgaatgatatataaaacttgtccaggccggatgcagtggctcatgcctgtaatctcaatattttggcaaaggcaggcagatcacctgagatcagcagttcgaggccagcctgaccaacatggagaaaacctgtcactactaaaaatacaaaattagccaggcatggtggcgcatgcctgaaatcccagctacttggtaggccgaggcaggagaatagcttgaacccgggaggcagaggctgcagtgagccgagattgtgccatcacactccagcctgggcaataagagtgaaactccatctcaaaaaaaaaaattgtccacacacatggcattcacatgaatttaagtcagcagaaattttctccttgagattaagatttggaatctggctgaagatttctccacaatgactaacttctatatattcatagtcttcataccatatgacttcagagatgtttttccagaattattgaaatgaccttcagtgtcctggacttcccatttgtttccattttctgtctcctgggatcttctggcatcctgcttagagatctcccagaacctgcagatcacagggcgacagaggctctgacagagcaacctagggtctcctggaacaaaggagacagaacaacaaagctgagctggaactgggcagccaggccagagagacaaatgccctgccagatggtggaagccacccggcattgttctttcttcattgttgtacctccttcatgacaagccattcacatttattagccaggcaaaatgtgaatttaataaatttattaatacatttatgcaatgtgaatggcttgtcatgaaggaggtacaacaatgaaaaaaattcttaaaaatgaaaaaactctcaaaaatgataaaaaccctctagaatgatttttttattttacattttcacaaacagccctggataccacccatctcattgctcacctagtgtatgtgaaaattgtatctcttcaatttttctggcaattcttcatttactaactgcaatgctttctctgttcaaaatccttttttgaattattgcacatatgcctttttatactttatgtgctttttcatatttaacatggaaagagtccttagatatttagcctcctaatatctgagatctgatagcagatataaaacttctgctaatttataaatcaagttcataatgtatgtaatgagttttggttttgcctggggttttcaaatttttataattatacctattcctgacaatatcaatacttagtaattgtctcaaaatacatgcacactttgttaatgttatcttccactctttggatgtataaaaatgttactattttattagatataaattactaattcagcggtatttaaaaattgtttgcttcataaactaatttaatataaaatccagaaagctaaaatgcttcactgaaatagcaatcagagatacagtattataataagccatatgccctggaatctacaagactcgctagcctaccacttacccttagaaccaaattattatctttaagtattagttactttatctgaaatgatgtcgttttccaattgcttacatgaattccatatcaattaaaattatgtattttgcacacttgcaattttgcacacttgcaaaaaataatagtttcttcttattatatgtgactgaataaaatacagtatagatatataattgtcctgaaccttaagtcacagctttctatgtacaacagtaatcaatagtccttaaattaaattttgtctctcctatcatgtttagaaatttgtttataaataatgtaaaaatactctctaaagaatatttcctacttatcctgatttttgaataatattgtaaaaggttgtataactttttacatttataaaacattgtatatcataacattgagaaattgatgtaccatttcttacatgtacattacaaaattataattttgacaatttggtcaaaggcatttacaaaatgcatttctaggttatagcgtccaatctttgatgtcactttaaagaagatatcaagctgtgacaaaaataaaatttttgaaaatgcttcattaacctgaccctttgaggtcatttatatttccagtttataaaataggattatcttttatatagaaagtctgatcacacctcctgcaagcttaacataattagaacctgaaagacagttgttttaaaatgccaaatgcacctttaaccttgatccgggttactggcccattattttcagtctggctgttagagttcctacacagtgtatttaattctatgttgtgaaaaggctttttacactgcattagtgaaatggagaatacatcaatacaaatcttaagaaaagagcaaaactataaatttggtaacaaacaccttacattgtaaattatgtcgggaaatatgacataatcccattacaaataaatgccaactacctgtgaaatgtggagaagtatattacctacctgagaaagtaattgtaaaattaatggacaaatacctataaagtatgtagtatagtaagatttctttaaaattacttaatagtatcaatgttaatttttatgtttaggtcaatgaattatgggtacaacataggatacttgttactacattcctttcatataatgtcttaagataggtatttttatgagatgcattaattcatggtaaccatatagaacaggtattctattttacaaattaataaaaattatcaaggactgaactctggtaaataaataataccaagaaatatcattgctcacctgtactagaatgttgattttaatactctatagtgtttcccaagttttgatagtgatacataataagattgaaaagttatttctcttaggatcttatgaaaagaaacaaaaattttcattgctaaaaactgacttctaatgtagaatgaaaactctatggttataactttgagtttgtctggtcaaattcttatgtaaccaattgtaaatcattcacaatgacttccaaatcaaaacatcagaatatcaataggacataatgggaatacttacaattaatttaatagtacttctatttaccaattatatattatagtactgacctaattatattatctcattgaataaccactgtatattactgaatcagtaattggttatttaaaaattctcacatgaaaaagaaccaaaaatttagttatgtttataggaaaacattttctaattagtctttaaatgttcattttatatctgataattaaataacaaaataacttgtcagcacaagcactaattttttccaaattacaaagtcatatgcagactttgtagaagaatctacaaagaatctatttttactctattatttttattctgtcagctttctctgcctccaaccaaaaataacttcttaccatcataaaaaacttgcgttttcaaaatgaaaacaatatacattagaatgcttagtaataaagcaataactgagaagaactaattaattataacagaactaatttttggtcagtggaattttttcacctattccatttctttttactgaattattttagctctgaaatatttttaaaataatatttattttattttatttttattatactttaagttttagggtacatgtgcacaacgtgcaggtttgttacatatgtatacatgtgccatgttggtgtgctgcacccattaactcgtcatttagcattaggtatatctcctaatgctatccctcccgcctccccccaccccacaacagtctccagtgtgtgatgttccctttcctgtgccaatgtattcttattgttcaattcccacctatgagtgagaacatgcggtgtttggttttttttccttgcaatagtttgctgagaatgatggtttccagtttcatccatgtccctacaaaggacatgaactcatcatttttatggctgcatagtattccatggtgtatatgtgccacattttcttaatccagtctatcattgttggacatttaggttggttccaagtctttgctatcgtgaatatttcttaacatttttacttgtgtgtacttcactttgtgagagtggaaaatggaaatgatctatggaaataacttataaaatatactacataatttcttatattaacaaacatagtagactaaaagaacatacgtattaatgttcaggtgaagcacatattatttaaacatatgcgcgagggataatattttaatagtaattgagccctgagcattggaattttttactttacctatacaatatagttttatatgtaatatataatacttgcattacaagccatagttgtcttgaacttacaaaagcattgtgtggcttccatttatttagaactccgatcagtaatgttatgttactatgcatttgaagtcattctttttcacttataaagtccctgagtatattcttacattgagtgcacgtcagaataattatgctttcttcttagtataaatgtagttgcatttttctctgtctttactgtctttatttctcctctgtagtattgggttatgttcaggtatttggcttccaagacatgaataaagacaaaggatctttggaattatttgacattggtataagtcttctcatattaatatcagcaggataaatcatgtatcattcattaatgatgacaacttcatgcacattgtggtagattctgggcacgaattacttcctaattatcaatgagaggtgaggtctaattctcttacccattattctatgctggtcttagtgcatcatacatagttgaagtaaattcaaagaattccaaggctgggtcacctgaacacttgaagctacagtttgagcatctaaaaaaaacaaataaactttttggagctgtgagaaatcatgtaagttcaactaccttgttgggaaaatcacatggataattcttgaaataacatgacatggaaaagagcctcacagactccagtaaaacccgtcaaagtacctcgtagttgggtgacatggttttagaccctacaggcactctttagctaaggaatctcccaggcaattcccaactgaagtccttgcccataagtatgcaaaatacaataaaatggttttttgttttgtgacagttggttacacaacaatagatgactgttatacccattttatacttgctggcagctatctcttaaccaatattaaaattcttatgctctctcaattattagcatattttcttctttattgtcttcaacatttaaaattaaaatacttgccttcctattctaatttcttaaagcccacattcctattccatggctacaactattttgtcacagaattgggaaaaaccctctggaaaataaaataaactcaaatacttatgtgttcttggaattatcctaaatgttctactttctttttgcctcagggaagttcttttttttttatgaggaacataaccaataagttaagggtggccttttttatacttttgggtgagtttgtttccctttaaatatattcaattatctttttttttcagatacttatgaaacaggccagggtcactactctcttctaaggtgttatctgagctcattgtctcatgaccaagagaattaaggagcatggacagaaagggtgagattggagagaaagtttaataagcaaaagaagaaagctctccacagcagagaggggagcctgagtgggtttccatttttacagctgaattcaaaagcttttataagaaacccctcttttctctgtagctgtttgagttacttatctgaaaagccatctgcataactccttcttatctatgtagttgtgagtatgtctctaggcaagcacaaagtgctgcttctcttttttgtataactgtgggtttgttttaggtaagcctccctcctccttgtgcaagttcccatggagcccaccatatacatgtctgaaaagggaggaaactttttccttggagcccaccaattatgcaaagaacaaaagccttctgtactggaccctgccggcttatctgtgcaggtgcagcctgagttttccccaggctactctatttttgcctgtacctgtggtttttcaagcaggctgcttctcggaggaccagacttaactgtttacttaactgattttatgttttcttctccctcacttgttggacatgattgaaaacaaaaccctgagaatactgtactattacttcagagctccaaagtttattttcatctaagattaatacatatgtaaggattagtatatattcatatgtatatgtattcatacttaaacacctaagtgtaatacacacgtactcaagtatacataagttccaaattctataactaaaattttatgaagaatataagtgatgcctccaagtttaaaattaacaagtgatatttatgtattaattatccaggtaaacagaaatggagatcacatatatacagtctaggactagcactaggaaacatcatatatacagttgagaataaaatgggaatgaaatcataaatatattcatttgagatcaccatagataggaagaaatataaaagtgtataatctatcaagaatcacacttaaatacacacacacatacacacacacacacacgttctaatgctggcaagtgtcagcagctatattttcctactgagatattttcctaaagatgtttttagagagtgtttcacaaagcaccaaatgaaggaagagatgaataccgctgaagactttgaactgtaacagaaagaacagatgctgaagaacagatgaaattaacttgaaaccgagctgtgacccttacttaatacataatatatagcacaatttgttacatttctatatatgtattctttcttattttggaattacaatatttacgctaggtttattgagtaagtaaaataattaaatattagttaaattgtctacttaatatatattgattaaatctgaatttattagtaatttctaccatgtgtctggcataggcaacaaaacacaggaaaggcatggttcctgccatcaaactgtacaattcatggctatgggccatatgaattaatgttagtttattcccagtcttaagtcttcacgtattttaatcaaatcaaatgagttatgcagttaagtcccatttaccctttaaaaaacaaaaacagaatttcacctatttttaaaaagttgttgtgagtcagtactttctccatttcttttttacagggtagatccagaatcttttcttttcttatgagtcaaaatcatttttgaaaatccagcgttcaaaaagtgtattttgcacctgttcttatttaagtttcaaaggaggctctcatgacaaaaaatatctcctgatttctgaattcttccctgccagatttgatttagctcatgtgactcaattttatggcatctcaatgtggagtagaaatcactttcaaagtcagatgtaactcattctaacaaatcctgtcattcatcatcattttaagtctctcttgagtaaactgcaatttgtaccaagttgtacaatatggtttggggatgtgtcatattgtctagaggaagctaaaacccagactgtcaaattcttttcaattaggactttgtgtaggatttgagttgcagtaaaacccataaaatagaatctgcagttgacttgagataggaatgagaattattactttaggtagtttgccaggtaggctgaatctttcatagcttcatccaattatgtaaacttcgcatggaattctgatattctaagtttatttaatactataaagttttatctacagtaaaaatgaaaaaaactgataatagaattcatagtttgatcactgacttcaaaatgcctcatatggattttaaggtatttaatttttcttgtactatatttgtgttaatatagaatttttatttttattcattcttttgttttaaattataaacactacatatgcaagactgctgcttccagtttttatgaattaagactgctttttttattaagatacaatagttcagagtagaacattattcggcagtaactatcaggagaagttaataaataatgagaaatgtaatatcttttcaaacaatgaatagctttataaggatcaaaaactagaaatgttaaggactcaaagaagaggtactctaaaagatgagctaagtgggtaccttttccttgggggtcttcctgagcctgtgcttatgcaagggactgagaaagcacaatttgtctcagtagagggcttttaattgaggaaggagatagggccttcaaagaggcgattcagtcagaatgaggccagcaaggccaagctctaatccaatatgactgatgtccttataagaagagagagaaagacaacagggccaggtatgcagagcaaccaccatcccaccatgggtagaggtaccaagcaggcagccatgtgtaagccaaggagacaggccagggacagattcatcccttgtaaggctctaagaggaaaccaactgtgctggcaccttgaccttgtgcttcttgtcagcagaagtgtaagaaaataagtttctggtgtttaagtcccaaatatatacacaacatacacacacgcacatatatatatatatgcacacacaatgtataaaatacagtaagataaagctaaagcagatgttaaattcaaaacaaaagtgcatttactaaataaatttaaatgtcaatactctaagactcttatctcaaaacctagagcaagtccagcaaatcatacgtaagaagagtaggaaataagaaactacaaataagagagcagaacaaataagataggattatgtatagtgaaaagtttgactcaaatggaaaaattgataatcccttatcaagattaatttttaaaagtaaacagaaaacaaaatcagcaggctcaggaattagaaagcaatatctcagcagatctactaacctaaataatacagtaatgactattatgaacaattttatgccaaaaactgtgacaacatagatatattaaattcttaaaaacatgaaacttattgaacttgaaaaaaataataatgcgatagctgcaaaaagacgaatacaaagcaaacaaacataaagcagattacagtacatctccaaaaatcttagaaaatgtaaatcctaattacaagtgattttttcacacatggaaaaaaagtaacaccaagaatacatgaacattttaagagaagaaaaaaaaaagtagaggacaccactcagctgtttttatgagaccagcattaaatttatataaaatttaaccagacaaaactgtctccttctcccgtggtggcagcagtggtggggctgccgcccgccggagcatgtcgtggactccagcggagacaaaggcgctctgcgcagtgtggggcaatgagcggctggcggaggcgcggtaccagcagctttaaggagccagtatggtggctggcagcaaggacccccgggccagccaagtaggagcttgtgtctagggccctggccaagctgggctatgagcggacctgtcccagtgctgggaggcatcaagctggttggatgcccagaactgaatgctatgctccagctgtggcctcaccagtgctgaatagagaggaagagccaccttcatagcttacatgtaattcttctgcttatacaacccagtaccggatttacttactttgaccatttgcacgtgttacaatcgggtgaaagaacatggtgttgcgaaaagaaagagcagttacacagtagaacagttggaacaggtgtttgctcaggcaggatgggatgctcagccctgccagactgtacttcttaacagcagtagcttgtaccaggagctggagtcagatggcggcaccatggaggactattcattcacaggagtactgggaacccaaagtcaggatctccatggctatccgacagatcaggaatcacaaagagaaaattaaaaattaaacggccgggcacggtggcttaagcctgtaatcccagccctttgggaggtggaaaagggcggatcaccggaggtcaggagttcaataccagcctggccaacatggtgaaaccccatttctactaaaaaaaaaaaaaaaaatacaaaaattagcagggcgtggtggtgggtgcctgtaatcccagctacttgggaggctgagtcagaagaatcgcttgaacctggaaggtggagattgcagtgagccgagattggaccattgcactcctgcctgagtgacaagagcgagactccatctcaaaaaaaaaataaataaataaaaaataaaaataagttcaacaagagtcttctgaagaagcacagaagagagacatcaggcagaatactgtacagattttggaatcggtacagttgaaatgggaactttttcagagttggacagaattttcaaggctccttctttctaataaactggccgttttttggaattggttataacacccgttggaaaggggatcttcattaccattatgctgagatcacctcccaggtgccccttggcaagcgacttcaggagtacttcaaccctgagaagtctgagggagggatcattatgacacaagtgtagaaaacgaactggaaaaaatgtttattacacatttttagagatcactattagtgaagctaggcgcttggagctgcaagtggaaattgactggtaacccattgcctactccaactcgatcagtaggaatgttcgatatttattgcctggaattattcctaaaagcccgggcctttatgccattggctatgaagaatgtattgagaggctcctctcaccgtacatgcagcaacattccctggacccaggaaaagaaggcggggttgacctggaaaccctttcagcacaagcctcattacaagtggtaatagaacccaccagaattatcttttgccacctcaggactgctgaggtcagggctctgcagcagagcttatttttacatttccaagtgaataccaaagtcttcagcaaatattgggttggtattaacagatttgtctctcagagctgtactggggaccccagagtttccctcaaatccatctacatcaaatttgtggaagtagagagagattttctttccactggctctttagttgagtgccctgaaaaagccattggatgcctcctaaaatttaacaactgaaggtcatccttcataaggatttgggctcttagctccttcttctctactcactttccattacccagaccactcctcatccagatgctgccatcagactcttcatggaaactctttccttgattgggccagtatgacttctaaggaatcatagtagactttggccagaaaaaacagacctcacctgaaaatgctcattttgagcaagcaagatttatagcaaacttgcttggtgggccagctatttctttttttaaaacacaaaaacaatttttaaagggattttagggccctaatataagcaaatgaggatacattccatattgaaaaaacttacactttgagtttcatatgaaattgaaaaattgtattttttcacaatgtttcattcttacacatctctatgtctctataaaagtaatatttacaaccctgaataaataagcaatagaaaaataaaacagacaaggacattccaagaagtgagaaccacaaacctatctatctgcctctcatgacagtagataggaaatcttaggtatttgaaaattaaacttcataataaataagaaaattcacaaccaaaatgaagatgacatcgtaaaagttgaattagattatatattgtaccagataacaattttcctcaattgtttttacaggtttaataaaatgtcaatcaaaatacattgagtatagaatttttcaagctaatctcaaaatacatatagaaacatgaaaggctagtaacagaaaaatggtgaaaattttttaaaaaagagagggcaacacaatcagatataataattattataaacctataatgaaatagacattccattaatggtagattttagacaatccaaataatggaatgaaaaataggcccactaatattagctctgcttaatttaaatcacctgaatttatgtatgtatgtgtgtatgtatgtatgtatttttaactttgaagttcagaggtatatgtgcaggtttgttacataggtaaacttacgtcatgggggtttcttgtacagattatttcatcacccatgcattaagcttcctactcattagttatttttcctgatgttctccctcccccaccccgttgtgacaggctccagtgtgtgctgtacccctttatgagtccatctgttctcaatatttagttcccaattataagtgagaacatgcggtatttggttttctgttcctggtaaggataaaggcctccatctccacccatctctctgcaaaagacctgatctctttcatttttgtggctgcatagtattccatggtgtatatgtaccatattttctttatccagtctatcatcaataggcatgtaggttgattccatgtctttgctattgagtcacttgaatttataaaaggatgacaccacaaagaaagtgtctcctttgtaaataaatggtgatgcctcactggatatctacatattaaggagaaattattgaactttaccttacactaagtacaaaataaatttgaataaactgtagacttaattgtgaaatgtaaatgataaattcatagtagaatttatttagtagataaaatcttcatgattttatggtagatttatttttaataaaacatagaataacaatgtgcaaataaaaatttaaaatatctttatcatcagaggacaaaatatgagaataaaatatcaaagcataattacacataagtatatacacgaatatgtatgtatatataacacatatatacacatacatatatgcatatatgtgtatatgtgtatatatgtgtatatgtgtgtatatatgtgtatatctatatgtgtatatatgtgtatatctttatgtgtatatatgtgtattgatatatgtgtgtatagctatatgtgtatatttcatcatcctaaaaaaattgactctgatttttatttttcaattttacttatttttgtggaaggactgacctctaggggttcttattctgccattttgtgtgatgttacttccttatgttacatccagttatacaaacacatatctatatgtgtataaacacatatagatatacagacacatatatacacatatacacatctatacatgtatctttgtatatacacatacatatatgtatgcatgtaatgtatataaatatatgtataatatttttcttataaaggattcacttttgtagataattttttttttttgagacaaggtcttgctctattgcccaggctggtcttgaactcctgggtgttaatacatgatgttattctgtggtacccatttggccccagtgttccttggagtgtgagaagatttggactttcaaaatcgaactaccacagaaactgctttacccaaaattttggttcacagccttcactggattacacattgggacacagtttagccatgtgaatatgttaatagaccattccatgtgaaatttctgagattaaagctattagagctttgtttatgtatgtgaatgcattacatatttcgatgtgtttatgtatatatacaattattatattacattgtgtaccaaattagcctagaaataaagtaaacaagtacttaataaataaagaagtccaaacaattttcaagttcatgtgacataaataaatctgtcataaaaaagctggctttaaaattattaatcagataaaaactaaaatgtattaaaaattttcagcatatatttttgtctgagtttcacgttggtccttgctaaatattttgaggtgtcagggtttggcacaaaaggttagaaaactgtaaaccatacaaaaatcaaaaagggctttgtacgagttttttgacaaataagacatttaatattgttagtttaacaaaaacagctgaatcttctgagttattggcaaaaataccaatgtatttcaccttaacattcttacttaggtaaatacctgatattcacaggccattaaaaaatggttcctggccaacatagtgaaaccacctctctactaaaaatgcagaaaattagctgggcatgttggcaggcacctgttgtcccaactacttgggaggctgaagcaggagaatcacttgaacccaggaggcggaggttacagtgagctgagattgtgccactgcactccagcctggagacagagtgaggctctgtctcaaaaaaaaaaaaaatggttaacaaggaaataacttaaaatcataattgtctaagatctcagttgtagaagtaattgaaataaactctaattttaacaaaattaagtacatataaatgaagtaaatgcctgtaagtaaacttttaatgtaatctaaaatcttaaaattatttttgatgctccttgaatgtctgtgtcatttctaattaagaaaggattttagagaaaacatgtttttaaaaactaaaatgttctcatctataaaatagtaatatctgatagatactttaggatttcttgcatcctaattttcactcaaatttaaggtttcaaataataaaaattataattaatacaaaattctgtatataaacatgtcaaagaagatgtgttcttattaaaattcagaaattttctagaggttaattcaaattttggactatggtaagttttttgtcctaaaataaaatgactagctatttttttttaataagacaaaataggaagtccaagtatgccatagatcatctgtgtaagtaatatgtagtctttccctgtttctctatgtgtctgtctttatatcgatacggagaaaataagaaattataaaaggtaaaataataaaatattgtttaaaacctgataaaaattgaagaaatttggataattaacagtgttcatagttaaatctcttagtcttaataaagataaaatataaaatattacaaaaatacattgacttttggaaattttgttttaatatagttaagcatgaagtcagatttagcatggagccaaatttcacataaatgcttatattgctaggtttcatactatatttgctattctgcataaatagtaaattgtgttaaaaaactggtcgtgtgcttaaagaacatttcttaactgcacaaaatatatagtggtgttggtggacttaaagacattaatatacataacacacatatatatttgctattattttcacgtatttactgtttgttttactttgggttttacatatatacatgtgtgtgtgtgtgtgcgtataactcattggttttacatgtgtgcatgtgtgtgtacatatatatatatgtaaaaccattgatttatttagtttctaatggaaggcttgtatttggttctataaatagtcattttatttcctaagcattttcaacaattcatcattagctctatctatttaaaattcctaagttacctttgtcaagactccaaaaaatgatagaccacaccagtcatttgaaattggattggttttgcttacctctaataatctaaagagctagaagaactttaaagttccttgaaggaaagaaagatttctttctataaattctaaacagaaataatacattactttattatttttaaatgtagtttggacatggtgactcatgcctgcaatcttagcagtttgggaggccaaggtgggtggaccacttgagctcaggagttccagatgagcttgagtaacatggtgaatcccatctctacaaaatatacaacagttagctgggtgtgatggtgcactcctttattcccagctacttgggttctgaggcaggaggatcacttgaccccaggaggcagaagttgcagtgagctgagatcacattgctgcattccagactgggcaacagagtaagaccctgtattaaaaataaataaaattaaattaaaattaaaaagtaagtaaaaataaaaatatttaaatgatgtttattttctaagtaattcaattcaatcaatactttgagttggttttagatcttttcctttaggtgatgaaacaaacttataatatgggtacaaaattttaaaagttcagaaaaaattggccctgttcttaaaaattatattcacttggatttctctcaaatgacttcagatgtgtttaccattattaaaattaagtgacattcacttggattaaataataataaattaaaatatgaggctttctagtactttttaattccaagcctttatcactgtttggacttcatgtgtgtatttagaaacaaaatatgtacaaatattgcactgctttaaagattgtagtggtaaaagatacctgatcagttgtcagtactcttgtctaaaaatcaatcttaaaaatatgtaatgatactcatttaaataggaaataattactgtgcgcttttgcttaccttgtccctgttttgttacataatattcaaataaaaggggattatttatcctcatacttgatttccagaactgatattggcatttaccattgttttttaaatggtagggggaaaaattaattgtcttactttcctatgtttggcataagacctatcacatttctgatgcttttggtcacagttctgtctctagaatgccagcaattagatatatgcaaggagtaacctcaccactttaatataatggtttaaagtgctatgagcaataactactagacaccaatcacagtgttttaatttgtggcatggtagagagaatgataggactttctgcagtataaatgtgctgttaactaatctttgtgctaataaattacaggtttttactcctgggtctgaaaaagtcatcaaatcttggtaattcttagacactgacatcagtcaaagcctcatctgcagacctaggagaaggtgataataaaaatgaactgcttttgtgagacacggggccagaaattaaaactgttcaattgctctaggcccaagcattatttcagaagaggtgggtatgtgagattttaaggtctgattttgagggataaaattaattcatagtttttctgtaagtcaaacattgatatcaaaagcacactaatgcaaggccagtatctgggcccctctgtcagaaaaaatagagttttcttggagcattaatatgctccttaataaaaaattataaatgcttttcaaaaattttaccttatggtcaaactgattaaaattaaataagtttgtttataaagttgtaataaaattaactttaacattaacaatacaacttataaagtaaaattttgttttccctttgaaacgaaagtttttatataatactaataaaagtaattttgaaaattttatttaccttttaaataaactgcaaaataaaagaaagcggaaagagatagatttagttggcattatgttttctttttttgtaggggggtggagtctcaccctgtcacccaggctggagtgcaacgccacgatctcggctcactgcaacctctgcctcccgggttcaagtgattctcctgctttgcctcccgaatagctgggattacaggctcccgccaccacgcccagctaattttcatatttttagtagagaccagtcttcatcatgttggccaggctggtctccaactcctgacctcgtgatctacccacctcagcctcccaaagtgctgggattacaggcgtgagccactgcaccaggcccatgcagtctttactaagtcatattgtttgagaaactgtattttattcaaaagaaagattttcattggttttaaatatttaaattatcattttgatcaaatgaaagattattttatagtgacctgtgattctattttgtgatatcaagtgtgatatttgaaaaacatcgacaaactttccacaagcaaactttcaagttctaatttcagtatttttgacctcaaactaaatttttctggatattgggtcccctgaagtccaagagagacatattaagcttatttggtatattaaaaacataaaaaacatcatcaaatatagtgtttaaatttatttaaattatatttacataaatgttaatagtatatattccaaaattatatgagattagtaaaattctaatatgtcatatatgttgtcagaaatgattataattatattaaataattatatgcctaaaaataaccaaatttccttgtcaacggtttctttaactatggctgtcctaagacttttgccagtaaaaatctgtttacttttataacaaaacacacatagaggaactttttattttgccagggctttggctgacatgatatattttcacatgtaagaatactgatttgaaaaattaatatttattttatagagccaatgaaaactcataaggaggaatagccttgtatcttatctgtgcagttccttagtagggttcctggtctgtgataagtagacagtatcactttctgaacaggcctaggagtctcaagttgttgtgaggcctgaataaaaaagaagttcacacagttcatgtacataatctgcaggtgcgggtgaatccttggttgggctggagaggcctttagaggtcaagtctgagattccttgtgagaggtttcatcaaagccaatttaggaaagcctctatggacaatgattcttgctatactttgtgtgggtaattaggcctggtatagtgagactaaagcttattttataggtaggttagttctgctacaatttgtccttgagaaaagtaggggatcagaaaaaaaattgtgtttcagaaaagaaactataatattaaattaacctttaattatttggggggacatgtggtcattcatggtatggagatgcccaaaacacccctcctcaacatgaaacagccaaaaaataaaaaaaatcaacgactagattcccgtgattgaggaattagtaattagaaagtggagggactgaaacaagcccagctgttccatgtaactaatgttcatagtttcttctaagtaacatagaaattgaccctgtcagtcttaaaatttgagaaagttacatttgtattatctgaattcctacctcagggaatcatcagccctcccaggtagtatcacagaactaaaatttactggatcaccgcttccagacaatgagaggccaaaccccttatccgtcctgattacctgaccaactacctgcttcctgttgaccagttcttcttttcccctctctaattcctgttgttttacacgtggtaacatttccttcctgctgtatgaagccctaattttagtgggttgaggagatgaatttgagactaatctcccatctcactggctgctacacacaaattaagtcttcttccctggtgatactcattgttccagtgagtggctttctgtgcagcaagtaacaggatgtaggccacactcctggtttatcatttacagtgtccatgatctggaaggaggaagaatagggagatagcatttaatgggtatagaatttcacttgcagaagatgaaacagttctgaagatgttggtaatggttgcataactgtgaataatatactttattatacaattgtaaattgttaaaatggttaatttatgttatgtatgttcagccacatacacacaatggcttttctttgctctgcaattaagttccaaactcctttggacattcaacattcatatattatctgttccctgcctacttctctaaggtaacttcacaattctgtgtttctttctttctttttttaatttgattctctttgtttttggttctgtggggttttttgtctcataaccttgaaattgcaatttttttaaccctctaaaggccccattttcctgggtcttcttttagttgactaattatcaaccttttagcctcagctataatatcatttacacaggcagactatgctaattaacagcctctcacaggttcatacatagaccattcttccacctctctctctctctgtcacagacacacacatcagtatatgtgtccactacagtatatatcctagtatatatccactacagtgtttatcacaatacaaaccagttttcacttatttgtcttttactgattttttttctttatttaattgaatatagtatcattaagccctggaacattgtttctctcatttaatggaatatccttacactgaaaactagactatcacctaagtatatttcagaaaatatatgttaagttactgacagcatcatttgctacaggtttttattatacatcatatccacattagtttgttttagcaaagtctttaacatgatcatttctctgttcttaaaacagaaagataattaactcatgttttaaatggacaaatttggcagttctgatatcagaattatggtcacaactaatgtgcctcagggatcatgtgcattttgtaaatctatgcgtatatagatgaagacaacaataagaactgaacagtggagaattaaagagaaaataatttatatgaaggtatttcttgctattaaaagtactctgctcaccaagtaaaacaggtctagatatatacaaatggcaaaaatcacagtggaaaaataaacatatttcaaaattttttcaagcatgtcaacaaaatttattttaaatacataatatatagaaaatacataaaacatgaaggttttttaaatacatggcatttgccaaatttgtactaattttaccaacataactactaagatatcaaatataaaaataaaaatgattacagcaacttattttattttcacaaacaacacttggatattacagtatgttgtcatttttaaaaaatattgttatatgatagctatcttatgagtgagtttttaatgaatcaattagtcaaatttaaaataatgttaaattatttgagcagtgggccatttcttcatcttagaaagttctccatcatttttctgtaatacttctcaactcatttctgttctaaaaatatttcaagagaaataaaattttgcctgtttattctactaaattactggtttatgaagtttcttccaaccgcttgtgatcaaactccactaaatgctaaaaatgtaattttaacactgtgtcttttatagatattcagtatgataatgtctctttaagaaaatgtgttctgattttacttcttgcgggaaaaaaaactcttcgtaattccttgttatcgatctatgtaagatttataaagcagctgtctatcacgtctggcagaccagataaaggcttaaatatcttttctgctgatatattaaagactcaaggagtgatgaagattcattgagattctaatgaatactgtgatttttttaagagaataatgcaaactcataactaataagacttgtgaacatctacgtcctcaattttaaaaagtataatattttaaaaatggatagcatggtaaaagaatagtttctatctttagcgcatcactcagtaaacatgaagatatgttagaaaataagaagaatatgaaatgaagatttcacagtaaatattacatttagaaatctatatatattcacacctatatatatattaccctaaaatcacattatgaaatgtcacagctggtattttataatttagaaatgtaagccgtagaccatcaatcagaaggctcaaaatcacacaaagcaaataaatatgatttgcagagcagacatgaagaaaaattttggagagagaagttggcttctacagtgatgtaagaggattttgctatccaagttgtctgaagattattgaaatggcattcatgaaatcactaagagtttgtagtatataccttgcctttagagaacgccacagaatgtcatgtctaaggcaaaaatgggaatagttgctttgggttcaatctgccctctcagagggtttggggacatagttgagccaagagtgttagaaagtcagctcagggccatttgaaagtgagtcctagagaaccacggggagaggtgagatgacttcaatagtgagagtctgtgagtgaaggattaaggtaatgccagggatgggtgaaacgttcattgatcacgtcacaggaattgtcatgacagcataaaaatgtctgaagagtgtctcaaaaagttcatgaaagtgtcagctttgtacagctgccagtgcagagactgtagagcagcttacactaccatctatcacatactgagaaagaatattcctgctcctctattcaattcttccaccattaacactagctgtgtagcaaaataatacatgactctctactcatgttaagtggcaagccctattcttgatttaggaattaaaagtttccattcaaaagtgttaattcatatttcaatcacgaattcaaaaataatactctttctctccagattgccaggccattgccatagaatgacagacaaaattatcatttgttgcctctctccagctcctagctgcagtttgagccagcttctaggcaaggctgcagctgagggtaaatcctagtgaattttatagctgtgcatcttcagcagctgatagtctgaaaactaaagagttgagtgtgcagattgtgaataagggatttgggaagggcataaaagagcccactatgcaagtcattctcaaatgtaagcttgccttaccatccgctctagggcatttaacaacatgtatttcaggaccgcagagaatgtaatttagtaaacctaaggtgtggcaggtaaatttgcaattccaagtaatgcagatgctgatagtgtgggtactacattagaatcgccacactcagggagtcatagataagataaataattcactcaaattttcacaataaatgagttatatagaccagaatcaaatcaagctttctaacccaatcccacaattaggtctctatatctaattacttgccgatgttgtcacttatgtatatagtagattataaatgaagtggatattagggaaaaaatcctggtatatgctggaggttttaattttatatatatatttataaaatttcattataagttaaattttgataaactattttttcacatgtaatataaaaatttcctgacaaacactgtacaattatgtaattctaggagtaattttattatgacattttacatctgatcagcattttgaagaaaaaattaaataatcttttcaaatctacataataaattatgtagttgaacatcaactttggaagttgttttattatggcttattcacaagcattttaatgtttttccccatatatctatatgcatgtgtgtgtgtgtgtgtgtgtgtgtgtgtgtgtgtgtgtgtttgatatatatcgtgctttattttaactcataagactttatatactggaaattgcttttttatgaagagtggtaaactcacacgcattagtcatatttgtgtaccttcaatagtgtatacgaagacagaagcattctttaattcaagataactcagttgaaaataaaggctgcaaaaatacaatttttagagattagttctagaaatgaagcatgtgctttgccaaatcacattgaacaaattaactttttaccttttcttactgacaatttggacttgatggagagaatatagtattccatgattagagtagaaatatttggaaaaattcaaatacattatggaatcctgatccctcagatgctaagcaacaatcatttattaacccatgaataatggtcttgataggttttgtaatcgttttgtaattgcttttattttatttaccaagctatttaagagttttatttcattcaatatagtgcattaaatatgaatttgacaaaaagcaatcaaatttttgggagtgttttatcttcaatagccacaaaaacctggaaaaatgaaaaatttattaagaggatatagggcaggtttggtcatctgtctaccaaactagagatgacaccacatttcaggaatggtattagtctgttttcatgctgctgataaagacatacctgagactgggcaatttataaataaagagaggtttaatggactcacagttccacgtggctggggaggcctcacacaatgatggcagaagactaaaggcacgtcttacatggcagcaggcaagagagaattagagccaagtgaaaagggaaatgccttaagaaaaccatcagatcttgtgagacttattcactaccacaataacagtatgggggaaaatgtccccatgattcagttacctctcaccgggtccttcccataacacatatggtgtatgggagctacaattcaagatgagatttatgtggggacacagccaaaaaatatcaggagttaagcacaattactctacaggaaaaaatgaccctaatatataataacagcattaagcttgggtaaccaatgcctaactcagttggtgaccctatggcaattagatgagaaacttttccaggatctgaaaagtagatagacatatttgctcagggcactcaaagctactgccagaaaaaatttatttaaaatagttatttaaaatagcatctttttgatatgattagatttattagctttatgatacgtctgactgttcatatccaaattaatgcaagccctcacggtcatctcacttttttttagaatattagatacatacatacatatatacataaacatgatagagatgataggtagatagattagatagatagatacatacatacatacctaaacatgatagagatgataggtaggtagatagatacatacatacatacataaatatgatagagattataggcagctagattagatggatagatacatacatagatacataaacatggtagagatgataggtagatagattagatagaaaatagatatatagatagatagatacataaacatgatagagatgataggtagatgatagatcatcatttagatatgaacgatagggctctctatatatatattcatgtgtatgcatatgtatttttcatgtatacacatattttttcatgaaaatgctattttgctgtctttgaatatggagtaaaaggacagaagccaaggaatacagatggcctctagatgtgcaaggccaggaaatagattctcccctagagcctccaaaggtaatgcagttttgccaacccacttcagatttccaacctccagaactgtaagataataatgttgtgctattatagcccacttaatttggagtagcttcttacagcagcaataggaaacaaatgcatccgcccactacattttagggtttcagtgaatggcaaatgattgaagtgaaaatgcagcctagagctaagagggccactgcctggcatgactggctctatgttgtttttttccaggatttctaaatgtcattgtccttgagtcagtgtcccaagaatcaaaaactctgatttagtatgaattttagcaaactttcacccacactcaagtataaatttaagaaatgtatcctgaatattcagagacttccaattttgccaaaaacttgttttagaagacacgagcatttagctagagtcacagcagccttgttggtttcgagtccaaatggcctcgaaggttattgtctttacgttgttcatttggcaatttagcttctggatatcaggtgcctgccattgctgcaacattttctaaaataatcagagacatttgccctgactaaaatagaaatttctcttttccctgggaggaatatgcatgaaaacaaaaccaaaccaaccacgtcaacaaacctttcgtctctcacttatggcaggctaccacttttcttttatgtaaaacctccttcctcagatctgctcgctgagatgctagcaccttgacaatcctgcccaagacttaattgtgtctgggactaaatggaatccctctcctgacattttatgtttttcagggcacttgtttctgctatgttttgtttgaggctgttcaagtctgataaagatatttaaaattatcattcttgcctatcctttcacattattcttagtcccaatagggattataatatcatgccacagcataactggctacattcataagcttctaccttcctttttactggaaatccacccagtgtttgaaaatcattatgaagttacctttccaaagcgggctgttcaccatccattggaattcagcaagcaagcagtgctttggaattccacactcatctcagcaaaccatttccaacagcttcataaccatctgtcaaaatgagctcactacaattccaggagttttaagtggtctattatgcaggcactccttggcctgaaatctcagcaagcccagatgcagttcctacattaaatgggtacaaatcagagtttacaaaatgtggaatgtgaaatggattgcttatactctttaattttttaaaatttctgttcctcaatttaatcttggatctaaagtaaacatttttccaagctgatggtaaattcaaagagtctttctagaggctgtctgtgcctgggttgagtctaggttaataaactaaaatggaatgtgaattcttctcccaaaagagttcttcatatctctaaaggttgggttttcatatcaaaataaaatggtttaacaaaatcttaatatatgaaatctgtaatatttctcaacatctgtcattaaaactttcatccttaacttggttttttctgataaggaaagggcttgtacacaaacatagcattacattccttgaacactttgacacttaagattttacttaaagttatctgttttggatgacaaagttagtttttttgttgtttgtttgtttgttttttaagacagaatcttgctctattgctcaggctggagtgtagtggcatgagcgcagttcactgcaacctccgcctcctgggttcaagcaattcttctgcctcagcctcccagtagctgggatttacaggcatgcaccaccacgcctggctaatttttgtatttttttgtagagatggggtttcaccatgttgtccaggctggtcttgaactcctgaccttgtgatccacccgccttggcctcccaaagtgctgggattacaggcatgagccaccatgcccagccgtcaaagttagttttatacattaataagcttaagacttgttactatttcatttatataccacatcaacaaaattttctccttttactgtttatgtcttagtccatttttgttgtttgtaacagaatacctgaaactgggtaatttatagagaaaacaaatttatttctttcagttatgaaggctgagaagtccaaagttaaggggccgcatggggtgagaagctccttggtggtgggggcttggtagagtcccaagtcagtgcaggtcaccacgtgatgaggcagctgagcaagctggctcaggtttatctacctctttctatgaaaccaccagtcccactcttgtgatatcccattaattcaggattccattactctattaactcagaaatttattaatctgttcatgagggcagagccctcatgactcaatcagctcttaaaagccccacctctcattaatgctatattgagatcaaatttcaattttagcttcagaagagacaaacatccaaaccacagcaccttacaaggatcaaataaactgaaacttaaccactatggcatgtaatacataccttgtttcctctttatcttcttccctactaggaaatgtctcccagccttcacctttttgcttccacttgtgatgtgtatgcatgcctttcaggctgatgaactaaatcaaaaatgacgttgactttaaagtgtatgtaaaagcctgtcattctcactctgccttttctctctcttccttctcagtgattctacttcccaaaataaaattttgcctcaggctctgttttgtaggaaccaatgccaagatgtagggttgtgaagttaatttcccgatgtgttacattttacaaaaaaggaaaaaattaccatcgcacggcatgtaataatatccaaatttaactaccttattggtccttactttgagaattataagaccttaatgtgttccaccccacttccccacctaaaaagaagtctccctgctatcattgagtgtcactggtagggggatgtgtgaggatgtgtttgtcctgcttttcctccagtgttgcaggtactgggcttttctgttaccgttattttcctgggccattgattgatactattaacatgtcagatgcagctcctctgatccatgcttatgtgaaaaaacacccttcaaagggttctctctagtttctccctctaccactatttataattgttgtgtatgaggtatcctacatattatttttggacagaaccgctaaataatatgtctttaacaagattaaagtgcatttctgtcttatgtttacaaatgaaatctagtccagattggaaggacagcttcaagacagcttgaaaacagcttcaaatcacctgaagcctggacccttctatttccaggctcttctaccctcatgctcaccattaatggtttcatctcagagccaaagttggctgcgtgagtttcacccatcagaaaccattccaaacagcagaaaagggaaaggcctgagaaaaggtaccataattttaatttttctgtagtaaatattaacttgtcttcgactctatgtgactctggtggatcctgtattttctggaaggcctattgtctacatttggggttctggtctgagaggagaagaatgatggcatgacacccacatcagaatctaagtttcctgtttcctctctcattcgctctttggttagaattttctttcccatatcttgtctggtataggaaaagggcagcagaagaatggtggcagctaagataggtgtagaaaaaagaaaaaaaaagctatatatatatatatatatatatatatatatgttatatacatatatatatatatatgttatatacatatatatatatgttatatacatatatatatgttatatacatatatatatcttatatgtagatatatataagatatatatgtgtatatgttatatataagatatatataatatgtatatatcatatatatacacacacacacatatatatacatctaattcagcaattattccttaggacaattatttgatcatactctggaaccacagctttggggaaaagctaagatactgataaaattattttatgactctagcttgtgccattgacatgcttagatttagtatgtgcagaatgttcagacaaagatgttttagatatgttaagatgaggcaactaggcatgtcaatgttaagtgaaacagatggacttatttgctaccacatgtgtgtgtgtgtatgtgtgtgtatacatacataatttgtaactttattgaggtggtgctgagtaaatataatcaagtttaggcaaaatttataagctttctaagacctccagataaagacttatcaaccccaaggtaatcacatatgtaatttactgttacttaacaaggagtgcatttattttttaatgttcacgtacgtgtctgagcatcactttctagaaattctgtttagtagcacagtgtgtaattttaaatataagcttgttattatttttagttgggagagattaggagacaaatttcctctaagattcctttaaaacagccaagaagttaactcttacaactctcacaaatttcaaaatactatcatcgtaaaacattaattttgcaatctagaaacatggtcttaccattcaaagaaatctgaaagatgaattatctcattcaaatactatgtactaggagaaatgaaaatgatgagaaacacatcatcaattctctcaaacactgttgaacagatatgtgcctagtcttgtgttattttggaactacaaagctgaagagtatgtgatgctttcccttaataagttcatacaattttaagagaaaaatttagaagtatgtcatatccttgaaatgaacacagtattctttttatctcataatactgtttgaagaaaatatttttctcagttagcaattagtcttattgaagacaagttaactttaactgttagcatgtactctttttagttggtaaatattttattcataaattcctactaatatcactccctacacttttttcattctgattaaattaaatcaaatatgtttactttataaaataactatattgaaaacatttgtttataccatattggagatttgtgctatttgacagaggagaagagtttcaagggaagtttcaaaagttatcttcttttttatggttgcttgttaatgagtaacataatttcctagtctacggctttgattttaatacacacgtaacttgcctgtcataatagggcacaatgtgtgcttctcagggatatggtttggctctgtgtcctcacccaaatctcacattgagttgtaataatccctatgttgttaagggcgggaccaggtagagatcactgaatcacgggggcagtttcccccatactgttctagtgattgtaagtgagttctcaggaagtctgatggtcttataaggggcttcctcctttgctcagtcttcattctctctcctgccaccctgtgatgaggtgccttctgccatgattgtaagtttcctgagacctccccagcaacgcggaactgtgagtcaatcgaacttcttttccttacaaattccccagtctcaggtatgtctttattagcagcatgagaacagactaatacactcagtattagtggaaaaggaacaaaataacttaaaatctgttttaaaaatgaattaattcaaatgtgacttttgttatgtataattttgtgtagaatataggtagaagtttgcatataccactaaatatgatttaagataaataaatgttaaaaaacacaatgagccaattttattcaacttaaaaaaaactgtgtatacatattccacaaacctgtgcagagtctgtaaaaaaacataaaattctaattacaggcagaagttaattctaactgaatggggagatagagaatgtcccttaagggaagtataaatacttcaaatatgttgattctcacaaattgatatataagtacaataaactcactatcaaaatacaaaattgttttggcctgaattgacaaaattatataaatttcattcaaataattagcctctgacatatagtaagttaatatggggaatggtcttgcatttccagatattaaaattctttataaagctagactaatttaaaaagtttggactcatgccatgatagacaaatagaaatgcacataaaaattcagaatattcatctctaattcatcatgttatccttgcgacatctattattcatgagattccaccaaaacaactcctgtacttttctcgaaattgaaagaaagtatattatttatgtatagttcaaaaaggggctgtgaagaaaaagtttgtgtgtaacataatgtttttcctgttttaataaaaatggcttttaaaagtgtagtgagatattgatcatttaataaatggtgttgggataattgtgttgtactcgaaaatatatttcagatggaatttataattagataaaattttatagtataataataatatatcattaagcaaaattaattaaaaaaggattctagggcaaagagcaatggaaagtgattataaactcaacatgagtttttaacaaaaagtagatgtacatgtcttccttgatataggaaagtcctgattctgtaaccatgttatctccttagtggcatcttttgaacattacaaatacactggtgtattgtccagcctacttcagtcagtcaaggcttcaatttgtacatgcataaaggtattatgaaataggaaagcaaaaatatttgcccagatataacaagaagatatatggggacacagtgcccacagttctcgctcactgacaatcgccatagctgttttgattctagatgctgatgtaaatttacatctgtcatgtggcctaattaaggtctgattggaggactcacacaggatgtgcctattgtgaagtccaaagggaatccacaaaccctactttggctcaaattttttttctagatagacctgccttattaatagaagatggactaactaccattacttttgcaaactcaatcagaaaatttgaaatattttccttaagaagaaaatgttactaagataagaaaagaggatattttaggaaaatattcagcttgggaagaattaagtggttttaatacctttaacatgaatacaaaactatttctattaaataaaaatgaaaaaaagatcataagacactcaacagaaattataagattagaaataaatgaggaacaatacattataatgttaataatgctatggaaaaatgaatgctatggaaaaatgaatccattgtctatacagacattcagaatgcagatgtaaactataaaatttaaaataaaaagagggaagatgacagatacagagaacagctaataaacagctgagtgtactttctgaaaaagattccagaatagagtgaccaaaagcacaaactaaacacacaaaagcaattttataagctgtggatgaggcatcagaagatctaaatctgtgtatcaaaaagagttactgcaaaccacattaaatgaatagaaaacagtgaaagctagatatgtgcggataaaatgctagctgtttctgtttttggaaaggtctttcttattgcatcttttaaaagctttattgaagtacaattgttatataaaaatagtacacctttaatgtacattttcttccctattttttttttttgagacgcagttttgctcttgttgcccaagttagagtgtagtgatgcaatctcagctcactgcaacctccacctcctgggttcaagcaattctcctgcttcagcctcctgagtagctgggattacaggtgcccatcaccacgcccagctaatttttgtatttttagtagagacaggatttcaccatgttggtcaggctggtctcgaactcctgaccttaggtgatccacccgccttggcctccctaagtgctgggattacaggcatgagtgcctggtcctaatgtacacattttgataattttgtttgtttgttttttgtttgagacaggatcttgctctgtcccccaggctagagtacagtggcatgatcatgacttattgcaccgttgaccttcctggctcaagcgatcctcccgcttcagcctcctgcgtagcttggagtagctgggccataggtaagcaccaccaagcttggctaattttattttatttttgtgttttgtagagatggggtcactctatgtttctcaggctgatcttatactcctgggcttaagccagcctttagtctcagcctccaacaattgcagcaagattataggcatgaacccccacatcctgctgatgagtttagatatatgcatacatccttaataccttaaaccaaggtactaaatagattcactacacaattctcttgtctttatttattgagtttgtttttctttttttttgttttcagtcttttttcccccctttggtaagagtacttaacataagagttatcctctgaatatattttgaagtgtacaatactgtatcgttaactataggtactttgttatacacagatctccagaacttattcatctttcatcacagaaattttaaacccattgagaaacaattatccatttcttccaacctccagcccctagcaactacctctttattatctgcttctatgtgtttgattatttcagatacctcatattagtggaatcatgcagtattttgtccttttgtgactggcttattttacttggcttagtgtcttacctatgttgctgcaaatggcagaatctcatttctcaaggctgaataatagtctgttgagtgtatataccatgtttcctttacctgttaattcatcaatagacccttggattgtttccgtatcttggcatttgtgaataacactgcagtgaacatgggtgcaccagatatccctttgagatcctggtttaaattcttttgcatgtatatctaaaagtgggttcactggatcatattgtagttctattttaaactttccgaggaacctccatggtttatccatagtgactgggagaggtaatatttcacatttccatcaataatgcataagagttccaattcctacacatcttcagcaacacatgttattttttttaataatacttatcttaccaggtgtgaagtgatctcttattgtggttttcatttgcatttccctgatgattaatgatgttgagcacctttatgtacttggtgctcatctgtatatattctttaaataaaggtatattcaactcttttgttcatttttaagcaggtttttgttttttttgctattgaatcataagggattctcgtacattttgaatattaattccttatcagatagattttttctaatattttctctcattctgtaggataccttttcactccattttctgttgcctataacagatacctgaatctgggtaatttattgtttttaaagaattcatttcttgcagttatataagctgagtagtccaaggttgaagggccatatctggtgagagctgctggggactctaaagagtcccaaggcagtgcagagtatcacatgaggaagggaattgagcttgctaatgtcctagctcaggtctctcttcctctccccataaggccaccagttccactcccatgataacccattaattcattaaccttttaatccatgaatgaattagtccattaggagggcagagctcttatgagccaatcacctcttaaatgctccacctctcagtattgcctcattggagattacatttcaacatgagttacagaagggacaaatgttcaaactgtagcacatctctttgttaagtttattcctaaatattttattatttttgatgctattgtaagtgggattattttcttaattttgttttcagatagcatattgttagcacataggtgtgtacctgatttgtgtatattaattttgcatgttgtaattttgctaaatttgtttattagttataacaatgactttccttggtacttagtttaatgtgtgacatccttactaatccctggtctctgaccactcttcaacttctttgttgtgacccaccataatgtcctgttttcattgtatttgaggtgtgatactctttttcactctggggctttgcatatcctgagccttctatctagaagttttcactaccctgttcttcatacataccagatcaattttccctgaagtccttccctaacaagaaatattggagtaagtcacctatacacattccccataacgtttgcaaatactttcaaatactttacttcctttagatattatatatctattgagttaccacctagttcacaacagacaacataattaatattgaaagaatgatgtatatttgtttgtatatctatgtctggatgtatgtgtttatgtgtgtgtgtatgagagaaagaaaacagagacaaagagactatatgtactattttatccaagattattggcgggtggtgttattgttatttttttcttgtttttaaacttttctgtgtgtttctaattctccttgatgcacacgtgtaacattttattgaaaataagttactaaacactttggaaagaacaacctaaaacagttcaccttctctatttcttaagatcaggtgttcatttcctattgctgctatggcaaattaccacaaatttagtggcctagaataacaaatttattatttacttctgaagatcagaataccgaaatgtgtctcaggagctaacaccaaggtgtcagccgcttgctttcctttttgtagacttgtccttgtccatttgaagaatgttgttcttgacattgtagaagtaacatgctgaattttttgatggctacaaacagaaccgtttctagcatctagagatcgccacattcctcggttcatggttactttccttcaatttcacagctagcaatggcaggtggcgtccttgtgatggcgcacctctctaacacttctttcatctccatatctctcattaaccacaacaaggaatgatcctgtttttcagcattcatgtgattagattgtgcccaccgggataaccgaggatctcttcatctcaagattcttaaccttatttagatatgggaactcccttttttgccatgtaaggtaacatatttatagattctggcaattaagtcttgaacatcctgggggtaccattagtctgtctaccatagatcagaaatcagtttttcaaatcattttacttaccttgaaattcttagtaattggggttcaaatatggatttgcaaagtctgcaactggattttaattttaaaatgtttaacaggtgaatatatatatatataaggtgatagaattgaaaaaaaatcacactaattcaaatgtttccctccctccctacctccctccctccttccaggctggcatgaagtggctcaatctcagctcactgcaacctccacctcaaggattgaagcgattctcatgcctcagactccccagtagctggggttacaggtatgcactgccacgcgcaggtaaattttaggatttttagtacagacagggttttgccacgatgcccggctggtctcaaactcctgagctcaggcaatctgcctgccttggcctcccaaagtgctaggattacaggcatgagccaccgtgcacagctgattcaattttgtttttattttgttttgttttgttttgtttttgttttttggggaaggtgtttcactctcttttctcaggctagagtgcaatggcacaattttggctcactgcaacctctacctccaggattcaagtgattctccagcgtcagcctcctgagttgctgggattacaggcgcctgccaccgcgcctggctaattttagtattcttagtagagatgggcttcacaatgttagtcaggctggtctcaaactgctgacctcaggtaatctgcccgccttgacctcccaaagcgtggggattacaggcatgagccagtgcgctctgccctaatttcaaaagtcattaaattggctgaagacaaattgggtctctcatgtaacaaacagatcatttgaaagttaataaaagagggagcaatttatttttcattacttttttgtaaatatatgaaataattattcatttaatactttcatgttttgtgatcttttcctatctcatttcttatttaattctacagggctgtaatttctcctttaattcatcttttgtcagaataataatgagaaataattataaattattaaaggaatcttgatccatagcaatttcaaatcttcctctttttttactgttatttttatttcagaacaaatcattatgttttttctaggtctaattatatgtgcatatttttccataggatgtattaatttcactaaatgttttatcttattgtgtttgagatatattcatttttctctctacattttcatgacttacatatgaacttttactttctaattcagtactatgtataatcataaagccaggtaactaagacatgttttcacaaagaatgaggggatatttgttagttaatgtagtttaaaatggtgctaaataatactatgagttcaagatatctctagtgcagttagtctttagaaccatctacattttgtcataaatggcatgaaaacagattatacggtgatttttatggtagtgagctggagaactgatgtattctaatataaatcaatatctacttaaagagtatttgattccattgttgtacaaacaatgatatataaaatgaaagagaaacaagacttcagaaacctaggttttaagatttcctaagtctattagttgttagtcaatttccccatttattctcagtttctttagtaggtaaacgatgatattgataagtgatagtgtattttatattttatttatccctgctaggctttctgttgttatttattctgttttatctagtttattctggttatctagtaaccttctctgcttggctagtaaatgtcggacaacccctttctcttacatttatatgcttggcctaggtaatttcttctacatctttaattgcaattactttattgcactgattctcacatttgtttctctgctatgtttgtgcttatcccaatccttgtgtccagttgctaccttgatatttctactatagttagaagtcccaacagtaccttacaagcaacatttctgaaatataacctatcttccttctgttattcaaaatgtttacacttggtgatactgctagtagtcaaggacaccaccactaattcatacagcattccagaaacctaagtcattcttagaattcttttcctcatgcctcttgtaatccataatatcttttcaatttcattcctaaaacttgtttgaaaatgtccacttttttatacttccatttaatctatgctaatgtcacctctaagctgtactcctggcactttctccaaaataatcttctcccatcaactctgactcacttctaatctactgtctccactggtgacagagttttcttgttaaaaacttgattttgtgccaccctttttcaaacctgggcccatcaccatatttccctaataagacctccaagcgtcagttgatcagccagacttctgccttctagatgcatcttttgctattttctccttaaccttttggattccagtcccaggggccctttgattattcaggtccattagcatttcacacacactctagatagcagtactacctctccttaaattagtttctattcatctatcgattcttaggtcaaaaactactaccgcaatgagtgggaagtcagatgattaatgtctgctgtttacacagaaacttgcagagatttacagcaagagcataagtatatcaagatgacaataacaacaatgtttaacatctagaagccacttccaacaaaaccatgtggaaggcgggagcaaattgcatagatgtggacaatgagatttggagagtttacgtaacttgctaaaggtcatgcacccggaaaacttgacaaaaggactgtatagttaataacaatgctgcctcagaatcagtttccttccatgttaatttattatttttccttcattttcacacctagcaacggcaggtggcgtccttgtggtggtgcacctctctaacacttctttcatctccacatttttcattaaccacagcaaggaatgattctgtgtttcgtcattcatgtgattaaattgtagccacctggataacctaggatctctcttcatctcaagatgcttaaaaacaagcatgacctgggacatgaaattctttgcattgttatagaaatgacaattctgcttaatcaaaaatacaataaaaatatttttaaaattgtcttgtatttctccatgatttttaaattttgactagaaatactttattgtacagatttatcatctctactctgtcatagatgaaaatgtcaatctatatctcagaaaaactattcactataaaaataaaatttcctattttatcttaatatttcttattgagtgataaaatacagtttttttgctgggcatggtggctcacgcctgtaatcccagcactttgggaggccaaggtgggtggatcacgaggtcaggagttcaagaccagcctggccaagatggcgaaaccctgtctctactaaaaatacaaaaaattagcagggcgtggtggcacgcgcctgtaatcccagctactctggaggctgaggcagagaattacttgaaacctggaggggtggaggttgcggtgagctgagatcgtgccactgcactccagcccgggtgacagagtgagactccgtctcaaaaataaaaaaaaaaaatacagttatcttttagctctcttgtaaaactagtggtttgggcatttttaaattccaattatatgcatggtgaatgatctctttaatgtactgttgaattttgcttgctagaattttgttgagaacttttttgctgtgttcatcagggatgttggcctgtaattttctcttcttgtagcgtccttctctcgctatgatatcaaggtaatactggcctcataaaacaagattgtaagtattctttcttcttcagttttatggaagagtttgagatggattgttctttaaatgtttgagagaattcacctgtgaaagtatcaggttttgtgctttacttaaatgggagattttttattactgattgaacctctttatgagttattggtttgtttagattttctatttcttcataattcagtcttgataagttacattgtgtctaagaatttatcaatttcttcaacattaaccaatttgcaggcatataatttttcatggtatcttgtaatgatcctttgtatttatgtggttttggcagaatgtctcctctttcatttctgatcttgtttatcatcaaaaagagtcatttcttttttatttactgtggatataggttggttaattttgtttattttttcacaaaccaactcttcttttgttgactttatcttttttagtctctatttattcatttctgctctgatctttattatttctttccttctgctaactttgcagaattgtgaagttttaacgtaactgaaaataccaggaaactgaattcaatagcatgttaaaagaatcattcacaatgataaaatggggtttatctcagggatgtttcaacatatgcaaatctataaatatgataaaccacattaacaaaatgaaggacagaactgttattatcgtctctagattcagaaaatgcatttgacaaaattcaacattctttcattataaaaactctcaacatgttagttatagaagaaatgtaccttaacacagtaaaggccatatatgacaaacccacagttaatatacacaaaagtgagaagttgaaagatttttatttaagacagggaatgagagaaggatgcctactcttgccgccactattcaacatattactaaaagtcctagcctgagaaattaggcaagagatagaaataaaagatccaaattgaaaaggaagaagttaaagtgtccctgtttgcatattaaaggatctcttggacattgacaaacataaaaactcaataaaaaactgttagagcttataaacaaattcactaaagttgcagaatataaactgcatacaaaatagtttatgatactttacctgggaaaaattttgaattgaagatttgaatgttgataatactccaaaaattatttaggactatatattgtattatgctaaagaagaattatatacaatcatttatcaaataattgctgaggacctactagacatcagaaaatgagaacaagaagacaaaggtgaaacatggccatagaatttggctgctaagatgtaacctgtagttcccctatacaagacaaacagttgcatgtaaagttaacaaaagagtaaaaaatcaagctaacactccacactcactatggtaatgaaaagcaacagcaatactactctggaatcatatctgtacaaaggaacaatataagaagttatgtcagtataaaaataagccaaaatccttctctttggctagcataagtggcaactgcctttttaccaatggcaactctagccctgcttcattcctctcaccttatagataagaattatttcgatatccaattgttgaattgcccctcttttttggcagcatgttatccagaacaaattgttgcttctttgaatcccctccgaaatcacttaatacaagtgaaaatcctatagcaagacccttctaactctcttactgacacattctcaattcctttaatgccatctcttctttagttaagcaagttaataagcctagctttttttttttttaaccaagttgttttctaggttgtcttttggcactagactttaacaatactgtgccaaaaaataagttcagtgttgttggaacttaattttcaacagagttgtatgtgacaatattgaaaaggctaaaaagggtcagtttatgcaaagccaaataggcatcattaacgtttattttcttgaattttatatttatcatatatacatgttaatttagagaggtttcataattgatacttatagtatataatatttagtttatatttttactacatatgtatgtagatgcaggcatacatatggatgtcagttctatttttcttttcagttttactagggttttctatgttgcctcattcagcctttatgtgtatttatcttacatttattatttcaatgacaatcaatgtagccctgggtctttatatcgatgtaagtttctacattttttttttaccacagcaatcaaccaatccaacagtgcttctgtttcatgagtttgaaacaggatatttcatgtcactttggccacaagttgaaaattacatactttagtcaccagtgcagcagcagtgtataacaatatggaagttcaaagttacaagtatgcaaacaaacaaaatctgatagtataattatttctaatatcttttaaaatcttatatcctatctgaagttctgcagaaaatttgctaagttatgcacaaaggactgggattcttacttcaatttatcttaacaattagagtaaagggagttgaaaatatcaccatcattaactaataagggaaacactctggaaattgctttttaggaagaaataacattaggtttttctgttcatgggaacacagaattaacagcatcttgctaaatggctataaagccttaacatattgggggaacccgcccccgataattcaacgtgagtccttttctattttccctaagtgtcggctggtctgagaaataaagggaaagagtacaaaagagacaaatcttaaagttgggtgtccaggacagacatcacatgtcggcaggttctgtgatgcccccccaagcagcaaaaccagcaagtttttattagtgattttcaaaagaggagggagtttatgaatagtgtgtgggtcacagagatcacatgcttcacaaggtaataaaatatcacaaggcaaatggaggcagggcaagatcacaggatggggtgaaattaaaattgctaatgaagtttcaggcatgcgttgtcattgataacatcttatcaggagacagggtttgaaagcagacaaccggtctgaccaaaatttagtaggcgggaatttcctcataagcctgggagcactactggagagtggggcttatttcttcccttatcaacaaccataaaagacagaggtccccatagcagccattttagaggcctacccctaggaacacattctctttctcagggctgttccttgctgagaaaaagaattcagcgttatttctcctatttgcttttgaaagaagagaaatatggctctgttctgcccgcctctcaggcagccagacctaatggttttctcccttattccctgaacatcactgttatcctgttcttttttcaaggtgcccagatttcatattgtttaaacaatttggcagttaacgcaatcatcacaggttcctgaggtgacattcatcctcagcttacaaagatgatgggattaagagattaaagagaggcataggaaatcacaagagtattgattggggaagtgataaatgtccatgaaaccttcacaatttgtgttcagagattgaagtaaagacaggcgtaagaaattataaaagtattcatttggggaactaataaatatccatgaaatcttcacaatttatgttcttctgccatggcttcagccggtccctccgttcagggcctctgacttcccgcaacattaacatgtaaatgtcaggtgatttgcagtgatctagccaaagactggcagatcatttcaatccatcgattgtgctaagagcattaaataacacatattataattaagctatttaatctattgacccaatgctatgattagaatctggaagaaattagacaaataattacatgacagatttagaaaggagaaataaaccagatagcggattaatccgttatttctttgaagatatttagggcaagtgtagctgttgttccattttttttaaaaaaaatgaggagaccctcattctaatattaagctatcaatctctaagaaacaaatatcttttgggagttaaccgttacttacaataacagtaagcaactcaacaaatataattattcctggactaattatagtattctatcatgaaacaagtgcttactaatcagatttccaatgagaccattactcttcagaaagagactgcctgaggggtagcataaaaaaccccttgtccctgttaccacaccaaattaaaaactccctagttctttcaaatacatgtaagacatatgtcttgcccatgtttttaagatctctaaaactttcaggaccaccatagactactcttgttctctgagaacagatactgtcacacaccaagaagtctgtttgaagaggtagagacctccatctttcaaaacctagttttaagacccagacataaatctggactagaggccatagatgcttctttctagaagctaaaagcctcctgaaaccattttttaaaagtgtttacctgaaacacaatatgcctcatattattgtcctgacaaccatcatgaggaaattgtttcttttcatctcctactctacttttatccctataatattgttttttacttcactatttctgatctcttttttctaaaatcacacccaatcattggaaaggcactgcatccaatgtaagtaggagaaatgtctgattcattggtttaatgggaagagggaacagcacaatcacaagggggggggatggattaattaatctgaagacatgttcataggataagtacgaagcagtcagactagaggaggttttgcaaaggtattaagtgtatctgaatgtttccaatgctagcactacaaaaacatttgatttaaaacaaaattacaaactttatttcagtcagattattagatcaacaacttccatcagctcaatccatctgaagcagctttgaattttactttctataatagattgttatgtttaacatatctatatgttaaaagatatgtagaattagggaatctattaatatgttccttcaatacaggggtcaataaatttttttcagtaagggccagatagcaaatattttaggcttcacaggctagtcttcatgggaactattaaactttgaaataatagcatgaaagccatcacatataatagagaaattaatgtgcagagctgtgtatataaaagatatatagtaaaacaagagaaagcaagatttgatagataccatatctactaaagtaggcatctgtgaactgcctggagacaaaaatcctacctactgtaattttgagtgtgtgtgtgtgtttatttttaaataaactctaataaactctattagaacacagttacacacattaatttctctattatatgtgatggctttcatgctattgtggcaaagttgaatagttctgatgaaggctagcctgtaaagcctaaaatatttgctatctggcccttattgaaaaaaatgcattgacccctgtattaaaggaacattttaatagaatccctaattcaaataatttaaacaagacattttttgttatagttttaaagtatgtagttattcatgtattgtaataaatttatcattatccaaataattgtgataactaataatgtataattctgtgcaataatgtttctatttaaaagttattagtatatttttatgacaaataaatacatatgctatataaatataaaatatatttatttcaactatcactcctaccaggtaagttcagtctagggttacaaacaggaagaaaagctttatctggtctcttagggtttatagcctgctgatatattttttcccattattttttgatgcttctgtgaatagtgctaatacttgctgtcaaaggtctttataaatgtaccttttcacctttctcctatttatctccaaatagctgacctttcctgcttgtcatagctggctctgcttcaccctgatgctaaaatttttgtcacaagggatgatgttttggatttgagtctgacaatagctgcaccttttacaaccacacaatgtgaattttgcagcctgggatactgtagcttcagatcactgctgacccatagcatatattaaccaattggactcattttcttttggtgctccgatatgtggagtttgccctaatttcaatgttttctgttagaatattctatttttattaaagtaattttatatttcacacaaatattccagttatttcagattttttccccaccatagtagtcagatacaagtccaccagagtaggtgttggagataattctaatgacaggaacattagaaaattcaaatatgcttttctcctctgttttctgagccaatatgattgtaccaaattgtcttgtataatctactttttttcttaaaattagttaatttcaaaaagattttcctttctaggattaaggacccaataaattgattgtcactaattatccaccaattctcatagttttgtttatcagtgacaaacttaatttatgctctattaaaacttctactatacaatctctctagggagagaaggatactgacatttaaatggcaggattacacaactgtaaaacatacataaggttaccaaactctccctaaaaattacacataaggagctttactaaatagtagggaaagattatgagtcacagcattttctctgaatgcattgtaacgtgaaccccaaatatctgagctaggtctcagtcagtttaggaagtttattttgccaaagttaaggatgtgcacccatgacacagcctcaggaggtcctatgacatgtgcccaagatagtccgagcacagtttggttttatacattttagggagacatgagatgtcaatcaacatatgtaagatgaacattggtttggtccaaaaaggcaggacaactcaagtcaaaggcaggacaacttgaagtggggagggggcttctgggtaataggtaggtaagagacaattggttgcattctttgagtttctgattagcctttccaaagaagcctatcaggtatgcatttatatcagtgagcacagggatgacaatgactttgaatagaatgggaaacaggtttggcctaagcagttcccagcttgacttttccttttagcttagtgattttgggaccctaagatatattttcctttcacatttgcccactttctttttaaaatctttgagagaaagaattttagaagaaaatgagtctctggtctcaggtttcctatactctctcatggctaggaaggtttattcctagatgggtaggtcacattttattaggaaatctcattttttagcaggttgtgaagtttgatatcctatgaagagaaaataaggggaggaagggagaaaacaacaaccaaaatccatttccagaaaattcatataggtcatattactcttaagtccatacatctgtagggaggtatgaaagtggcaaatgtatgtaaataggttgcagttattttcttctgaagtgtgagttgtctagcttcagtttgcagggctttaaggaagtgcagcttagttttcagtaatcgcaaattagaaaaaaattggaggaaaagtaaagaaagaagaaaaaaataaaaaaaaaacattattttggagacttgtagccaggaaaaattagattctagtctactctgtagaaaataataaaaattgaaaaacatagggcaggactagaagctaacaacaggtggactatagtttttgaaacataatttttctctctccagtttcctagttttactaaagaaaaatcatggtagaatcaatttgctttattatacttagccagattatttgtataaagtgcaagaataattattttttacgtaggttttttttctccaatggtgtcctggtacaaaaggaaatattcttattgcacttatgcaaataactatattgtcataagttaagtatattcagaaatagtttccaaattctggagaaatcaggtagagagaaacaaatatgctccaaattttgtgcacaggagtataatttactcaattgctacaagtcgtaaatagctcaaataaaaagttttcttgactctgttaaacaaaacaaaggttcaacaatgttttaagcaaaaaagtcaaaagattacttgagtcttgtattagttcatttcatgcagttaactcccgttctgcatgatattcatgaacattccagctctctatgagagtcatgaaagttattttcctctattctagtgaacaatctccaaagttatcagaaccctgtattcaagaacacttgttaaagttttatatctaattataaaaccaccttctaaagtggaccaaaacaaggcaacagttgtcagtgaatgacataatgttttaggacagacacagtcaaagacactattgacaaggaaatttgttacctctgtagcacacaataatttaatataacaattataatcattactgagaatgtatactaagtcatgtcagaattatagagcttcccataattttgtaacacataccaataagatatttatacaaatacatcccaaagaaagctaaacaccatttcatatttgacaatactccctgtatgatttttataacaaaaaaatgtcatttttggactttagggaatctaatatcttaaaagattaatcaggtcagaaaaagacataatttatatttgactttggaaagtttgtcaaatatcaagggtttataacatttgatatcacaaaataggatcaaagatcattgcaaaataagtcattcatttaaccatagtgataactcaaggatttcaaaaacaggtgaaaaccttcattctttgagagaagagacttaatattccaaacaataagccctaataaaaacaacatgaagctaattaaatttatttttcaaaattttatcaacaatctataacattttggtcatcttgaccataacatataattttcctgtcttttataacctttacaacttttattaaggagccagctagtgtttcatgaaaccctggtacttggacaggtgtctatatgcttttcttgcatcagtgtgccttttacattaatggctaatttatagagaaaataaacttacgttatctctcaaaatcagcccttataatctcaggcactcacctcttccatgatagttactggaatttgagaagttgaagtttaatttctggccctgtgtctcacaaacacagcttattttgatggacagcttctgaagataaggctttaactgctgtcagtgttgagattcagcaggatttggtgtccttttagacacagaagtcgaagcccagcaacttaaaggcacaaggactttaaaagcacatacagaaagttacagggatgtaataaccttaattataaaaaatcttatttttttctaagcaaaccaaatttagtaataataatataggaattattttgagaaagtgtaagttctgttttttaggaaaaaaagtataatgtcttgtaatttattaagagtaaagcgatacctcaagaaaattttgtagtttgaataaattctttagtatatgtgtttttcttaaccaaaagtcaatttctagaaatgccattataatttccatttaattatttataactttattttataagttttttttaaaataaatcttattatgacatacacagaccatttataacatgcttagactttctggtttgtcctgaacattcctctttcttaagcaaccattcattttattctaggacaaaatttaccatacaagattcttactcatataaaattatttctctttaagccttcttaccaaaaattgcctctttatttctacaactttctttacatctctcttatttcctggttccttttaccttgttttatacataacctttaaataatctttgaattaaacaaaaattattcaccctttttaaaaaggacttttttttagaaaaaatgttttctacaatatactgttattggaaaatactcaaataatgaaatatttattgtttaattaaatataattttagattctcaattatgacaagtttgtctacaagtacttatcccattcaatttaactaattattttactttaataatttatctagattatttatgaaaaccacaaaagtcatcaagtaaagttatgaaactgccattacaaaattggtactgagacagtgaaaaatatctgacctaactgactccatcttgcttgtaatcccctggctattcttattcattcctgggtgtaggccaaactaactttgggaggaacttagtttatagtttagctttgaaacaaagtcgataacagtccttcctccaagcaaacctccttcctgcctgggaactagaccatctaaagccacaagattagatgttatgtttattttagtaaataattcaatattttgctattttcatcaaatcagcgtcaatgtcttatttacttaaaattctacaagcaaagattattctgttttgggatggtttatagttttgaaatcactatgccaaattttgacacctgatagtatttggcagggataagtatgaaatgtcttcatcaataaatgtaaacaaaatgtatgctggcatttcttaagacatttctaatattactttaccaataattttaaagctagcattttattaaaaattttacttaagtcatgcaaacttgaaaaagcatttgaccagtctttcctttttttctgatgaagtattttatttaagggcttctatttttctttaagccaattaattagagatcttttatatatttttaatggtgaaacactgtgtacacaacacataatacatagatgtattggcataccgatagtagtatatcttacagattcataaaaccttcttttttcccctaactaaaacttgcaaactcttgataagctgtttcattaccctggcagttgtcaggtaaatagccctaaatctgtgtttgaaggaaacaactcttaggtgaaaaatcagacagcaaaatttacatcccagggtacagacagaaaaagtctggtggtgtgagagggagattaaagttgtatgccaaatgaaacataaaattagagaaatctatcataggactgtataaggggatcaattttatttagacagaactaccaatcttttaactgcatctctgatctctgggtagagcccacatagaatcctgggtctccaaaaagggaggattattattattattaatatatatatatttttgagatggagtctcactctgtcacccaggctggagtgcagtagcacaatctcagctcactgcaacccccacctcctgggttcaagcgattcttctgtctcagcctccagagtaactgaaactataagtgcgtttcaccacacttggctaatttttgtatttttagtagaaacagggttttaccatactggccaggctggtcttgaactcctgaccctgggatctgcccgcctcggcctcccaaagtgctgtaattacaggtgtgagccaccacacccagccaaaaaagggagaattattatgaggctagatcatgtgatgcttgtacagtgcatactaaaaattattttaaaaccaagacatctgtaactgtctaaactcttccttaaaaactcaagtagcctctgttgtagtattttggtaaaaaaaaatcaggtaacatagtgaaaaagcaagcagtttcagagctgagatgaacttgtctgtttatacatttggggttccacaaggaaaaacagagttttctccccagaagggagtctggtgtcttctccatttcttccatttctttaaggaaccctatgctgtcacaaactagtttaggtccctcatgcagcagagggtgcaagagaaaggagagacagcagaattatgaagaaaacagaattcagtcaactgagaagacaaagaaaaagcttttgctcaaaaaagacaaggtcctaggaaagaaaaaaacaaaaacatgaggccttttaagtacaaacacacacataggcacacaatcacacacacatcttgaatgttagattttaattaagctgacttttaaccattgagtgcctttaaaaaaatatttttaggtcgggcgaggtggcttatgcctgtaatcccagcaatttgggaggccaaggtgggtggatcactaggtcaagagatcgagaccttcctgaccaacatggtgaaaacccatctctactaaaaatacaaaaattagctgtgtgtggtggtgcgcacctgtagccccatctacttgtggggcagaggcaggagaattgcttgaacctgggaggcagaggttgcagtgagccgagatcgcaccattgcactccagcctggcaacagagcgagattccgtctaaaaaaagaaaaaaaaatcttttaaaatctcattactatatatcagctaggacaatttgctgctacttcagaagtaccaaatagcaaaccagaaagggattgatttaggaaccaaacccaggctgttgtgtggaaaaaaagacgatagaaccctagctatggaactgcattgtggggtgatagccattgctctttcagccaaaaatcggcctagcaaaaattggccttgttatgtaagtgaagccccttaagtagtcaaaataaaaaatctttattttttattttttttccttttgctggtccttctgctccccccaacacatcacctttattttttaattaattaatttatttatttattatttggaatttagccacttcagaggccttgttccccacaatttggaactttccttcagatttgatcaagttggatagagttggtcaaacccagtaagaaaaagaccaaaacaataacaaaaacagaaacaaacaacaacaacaaaaacagttaagcaaaacaaacaatcacacaacttatacaattactgaatgccctactggtaaaaagaaattaagaccagctggttgttaatcttaactttagccaagacaaaccccaattcagttacttacctgggatggatttcaggcagaagactgctatcatcctagaagcaaggaaaaaacataaaacttgccttctttgttggaagtgagttcaaactccagaacgtaattttctgccttccatcatcatggacgtagtaaaacttgccttccttgtgttggaagcaagtaaaactccaaaaagtaagttgtacagcaaaataaacttcagatcttgaccaaattttgcaacatcaggaattctctggagggggtgctgccagatctcagcaaattgtcttgttggtgtgagccataaagatagctcaagctggtaccaagcaccaataggagatttgtcaaaggtgaggggcacctccaccagaactcttttgtggttgccaaaatgtgaaccccgaatatctgagataggtctcagtcagttaaggaagtttattttgccaaaattaaggacatgagcccttaacaggcatgataaagccacaagaggtcctgacaatatgtgtccaaggtgtccgagcacagcttgatttatacattttagagaaacacgagacatcaatcagtatatgtaagatgaacattggtttggtccagaaaggcgggacaactcaaagcaaaggtgggacaactcaaaatggggaggggtcttctgggacataggtaggtaagagacaaatggttgcattcttttgagtttctggttagcctttcgaaagaaggcaatcagatatgcacttatctcagtgagcggaaggatgactgagcagaatgggaagcaggtttgccctaaacagttcccagcttgactttttcctttagattagtgattttgggatcccaaggtttattttcctttcaaactaataatgacatatataattatttcaataattattaatagtttcttttgtttattgttaaattcaacaatctaatcattgtatatttattgaatatctgttttgcaatattttataaatttataatttttataaattttataatttttaaaagtaaggaaaatctagctttgttttcaaggcatctaatttcttttataatttttattgtgtataaataacatgatagagaagcaaaatattatgtggggtccaaggaaaagtatatctgtttgaggatgctcagaataacttcatgtagaaacttctgttcaaactgtgatatgaacaatgggtagcattctgaagaccatacttgggagtgaaatagtctctagagatgcttttattattattattattatactttaagttttagggtacatgtgcacattgtgcaggttagttacatatgtatacatgtgccatgctggtgcgctgcactcactaactcgtcatctagcattaggtatatctcccgatgctatccctcccccctcccaccaccccacaacagtccccagagtgtgatattccccttcctgtgtccatgtgatctcattgttcagttcccacctatgagtgagaatatgcggtgtttggttttttgttcttgcgatagtttactgagaatgatgatttccaatttcatccatgtccctacaaaggaaatgaactcatcattttttatggctgcatagtatggaatcatgatgtatatgtgccacattttcttaatccagtctatcattgttggacatttgggttggttccaagtctttgctattgtgaataatgccgcaataaacatacgtgtgcatgtgtctttagagcagcatgatttatagtcctttgggtatatacccagtaatgggatggctgggtcaaatggtatttccagttctagatccctgaggagtcgccacactgacttccacaatggttgaactagtttacagtcccaccaacagtgtaaaagtgttcctatttctccacatcctctccagcacctgttgtttcctgactttttaatgattgccattctaactggtgtgagatggtatctcactgtggttttgatttgcatttctctgatggccagtgatgatgaacattttttcatgtgttttttggctgcataaatgtcttcttttgagaagtgtctgttcatgtccttcgcctaaccatgtagacaaaactttgatgtttgagattccagggtgagtttagaatgagtatatagtttggtttgactaaaatatttagggatgagaggtaaaaatagaataaacatacatactacaagttaagaatacttacctgaaatgcttgaaaacagaagtgtttcagattttgacttctttcagattttgtaatatttgtatacacatatatatgtatatgtaatatttgtgtatgtatatttgtataaatatttgtgtgtgtataaatatttgtgtgtgtatatattgtgtgtataaatatttgtgtataattgtgtatacttgtgtataatttgtgtataattgtgtgtataaatatttgtgtgtgtgtatataaaatgaggtatctttggggtgggacccaagtctaaacacaaaattctcttgtgtttcctatactccttacacatataacctgaagataattttataaaatattttaataattgtgtgcatgaaataaagttttgactgtgttttgactacaacctgtcacatgaggttatgtgtggaattttcgacttgtgatgtcatgtttgtgctcaaaaagttttggatttgggagcattttgaatttcatatcttcagattaggaatatgaatacgataacttgattgccaggagaatgttttttcttaatccgttataaaatttggagtcactaaagcatgtttaaacaaaatgatatatgatcagaatttttaagtgattagaaatagttggatgcattgtttaagtagaggttaatattttatttatttccttaatacatctgtcattagtttcttttgagaataggatcaatgaagaggttgctggtatgagattattataaaggaactctagatcaggaaagtgaagaagaaagtatttctggactatcgccacttctaaactttcatgtactatgatgtatttataccatagaataaataacagcacattttggtgctccgtaaatgggtccatatctctgtacttcataaactggttcatatcttcatgttgtaaaaaacccaatggcatactttctgaaatagttcacccaaggggaaaataatagtaataacggaagcaattgggtagagaacaggatttaggacttcaaacatatttaaagctcaaataaatttattcatttttagcctatttttggctttaatacattatattaaacattaaatttaatattcagataaatatattctgaccctaaggattttaatataaaatgcagtccatgtaaataaataaaatcttgcaatttttatttatatgtagttctaaagcttattgttttacagcttcttttacttcctgtattgtaggttatagacagctagttgatcattttgtagcttttactttcttatggaaagcaggattttctgtatattgcattgtgaacccagaatgtgctagtttattaatggaaagtgcaacttccaagtctccatttattcaaacactaaaatttgaaatagcagagtaattttttaaacatgtagtcaacagaatcagatgctaccttttggaaagggctgggtgtgtatgtatctgtgcataaattgactatgagcttgctttcaagttaactttatcatttaacatttactgaaaatactagtaatgaaataaacataattttgaataaagaaacattgaaattttctacagtcaagaacaaacatgttcagatgactgttgtttaatgggcccaggggcagcttatacacatgacttggtgcactctggtgcttgccaatagaaggtgacctacagtcacttgctagtcatcaaaagagagtttgcttagacctggatatagctgaacacagtgtggtctggttttgaaataaagaggaagagccctacctaattgtatattttttatgacataaacataggaataaacttgaattagagaaaaaatatcacaggcagcaaacagagctactaggacaaggattggaaaaatgccagagcactatatggagatgttgattgaattcatgtgaagcccctcttacttgctaaagggtcagttactgaacatccctccaggtaaagaaaagccaaaagccgagccagcttgttgtcatccaatttggcaagaacaccctgggtcagtcacaagccagtcagtaactcatgctcaggttcatctgtttttagtgatatagtgtctcacctagaaatttgaaaaaaatggtgttttaaaagttatgagacaagaagtagtataccaataacttttcttaatattaagcaaacccattaaaattaaataaacaaaataaatgttgtgcatactcataagaaaaatagcaactctttgttgagtgctaaccaagcatgccattttagtttctttacagttattattattatagctcaacaacaaacctcagaattatgttccactgttacccttaatttagatgatgaaacagaggtatatagagtatgtagctcatccaaaagcacactctacttagtgacagagtattcagactctagctacttaatagcatctttctttgataattttatgagtttatccatgtagatggtgtttagcaagacaaaaactactacacttcaacattacatgcaattatctagaatctcagttcttcaaacaagggtgacttttgttgtgaagtctggtagactctcatgactcgtctttacacttttggtaacttcctttgattagctgatccagaaaattctagtccaattccttatgaataataatgaaagagcgtatcccctactgattacaaaggtactataagaaaaaataaagacaaaacaatactcatcagaaaattgctatcctatatattaaataattcaaatcctaaattcaagcattcaggaaagataatggcaagccattagagaaattaaatagaagattctagaacccaataaggaaagcaagttatttaaactactgaaattttcaggtttgttactgtagtatactctagttgattatgacagatccaaagattaaaaacaaaatattaactattagagacatgagatggagattcagcatgcatgtatcacagaaggagaaaacaaacacagtactgttagagaaaaaatatttaaaatgtttcaggaaaatattctgaaatgagaaataagaaaatgaggattgggttaaagatcaaaatagccttgaaaatttcatcatatcgacatattctcgtcgacaagaacattccaagaatatgcaattcttaaatcactttttgatcacttaaaaaagtgataatcttttgaaagactagaaaaacaaaataaaacttaagccacatataaagataaaaaattcaactagttttcgataaaatattttaaatgagatattcacattacgtgatttcttaattatctttccactctaaaaataccatcattctgtatacataggccataaccaataaaaataatgtctgccgttactgatatatgctctgcctgaaaattgttaaatggtcttggcctatcaacacatcactcacaaggaacacttaaaaataaattttcattctcttcagaagacaaacacaaatcctgataagagactctcacaaaatcagtctcagcctcctagaaacatctgattttgatattcttcctgggtgggaaatgacacaggcagatttgtgtttcatcagcttagagataattggtcaaattgcaaggccgactttatcactaatggaatgaggggaaaaagaaaagcctcaaagacaggacattaggaaacatctaaagtgaaaaagaggggaaaaagaagtcagtaacgggcagaaaaagacatcagaaagtaggaacataaaaaagacaaccaagaataaatgatagtcaatacagtcctgtactgcaatgaacgttaagaaagttgaaggctgccaggcgcagtggctcacccttgtaatcccagcactttgagagtccgaggcaggtggatcaattgaggtcaggagttcgagacctagtctggccaacatggtgaaccccatctctactaaaaatacaaaaaaaaaaaaaaaaattagccaggtgtggtggtgcgtgcccataatcccagctacttggaggctgaggcaggagaattgcttgaacccaggaggcagaggttgcagtgagccgagattgcaccactgcactcaggcctgggtgacagagtaagattcagtctcaaaaaaaaagaaaaaaaaaaagttgaaggccaagtgtatgtgcttgattgttttcaatttcatttaaataatttattatatattgctagggattgaatgctcccaaagagcacagtcaacggaactaagagcagaaaaacaggggacatgagaaacaatggacagaagagaattccaaagcttctaatgttgttattttcctttctgttacaaaatgcccccaggctagtatgatttccaaactatattactactgttaacatgatataatttttcaagtaaaataatggaaatatattagtttccatctgattctaagaatgcattgcactctcacaatttgataaggtatttgaggaactcatttctgctctcaaaaaaaattctaaaaataatgcatagataaaattaggtgtgttatatattgagatcactataaaacacttttcttattgacattgcttcatacatgacagatgttttgacaaccacacttattatctctgtgtgtattcctctctgcccttccccttgctaacatctactgacaaacagtgatcagtgttagcaaacagcttctctggaactgagcatctatccagcaagcctcctgccatctacaggcaaaataaaaattcctcattgcaaaggtgaagaattaaacattggtaagtctgttctgttgttcttactgaaattgaagggacagtaatttaaactgtaatgatattttgccagaacaaactaaggcctcatgtacgtgaaaattaatggtaaaatacaatcttctctgcttgcttgctagcaaagcaaagcactgacgttattgtggggaaaaacttgccctttgaatttttatcattgtcatgtcacatttattaaacactgatataattttattgagctaggtcttctccaagcaagttttacaagccctgacatttaagagctaggattttaaatcagccaatgttgataaagttgattgtaaaatgttggtacttataaaagagaaattaaaataaaaattgatgagggaaaggaagtgatactgagggaagaatagaaaaaaaaaataaacccagatgttttagctctaggagagataaagctgagttaaaaccagaactttgagtccaaaaattacctaaccctggaagtgtgcccttatttgctaggtaataaaaacaatttaaaaatagtaagaaaagattatgaatccaggtcagaatgaagcaagggatgcaagccacagccatgatctgatatcaggttatgttgtgaagaagttaaattttataactatttgtatgtgggaatgaggttggagaaactcccaagacttatctggaattgttctttgatcatcagtgttcagcgataagtattttaattaaaatttcaatagatttttctttgatgagtatccaagctattctctcagcagataatctccctgaataatgtgatggaacagaaaacaaatgaaaatctaaaatcaacataggctgtactacgaatgcacctaaagttacatccattgtaggaatcatgtgtactttcacatactgaattttttacagaaattaagaggaaagcaattagacactaacaactaagatctgatgagtcaaggaggaagtgtatacagtacacacattcttttttctttctcacacaatgggttccattcccactactactccattcaaattgaagtgccttcaatgattattaaaaaactctctttaaaatagctcatgtaaccttacatcctttgactgaggctcaactcatgtcaatgcttcagtatcaacttttcctgccacttgcaacatattttgtatgtctgtatacacacatacatacatacatatatttaggtgtacatggtgtaatgaatgttctgtcaaccatgtggaaataagaaaaggacgtcagtttgtaacagtcttctgtaaaaacaaagtatttggaagatatttcactgacgttaaataaagtattctcggttttaggaccattttcaaatagcttctttcctataagatgtaggtattaaagattaaaggggttatgaaataggattattcttacttgaagaaggctggctaaatgttctaggaaaacttcggaggcattatttaaatgaagccactagtgtccaccagttaagttttcagtttccaagctaggttattattatttattttttttgagacagagtctccctctgtcacccagactggagtgcagtgccctgatcttggctcactgccaagactgggttcaagtgggttcaactgggttcaagtggttctcctgcctcagcctcctgagtagctgtgaatacaggcacatgccaccatgccaggcaaatttttgtatttttagtagagacggagtttcaccatgttggccaggctagtctcaaactcctgaccttgtgatcagcccacctcggcctcccagagttctgggattacaggtgtgagcctccatgcccagccacagggcgttattcttataggaactgacacatattaccaacattcacaaagactgattaaaatgccataatttaaattttaccttgtaaatatcaatgcaaatgtcatgatatatgcatctttaattatagcatttttttgccactctaagatatctatcttgaaagttaagttttaatcaataagttgttggtaagtatgaactcagaggggaggacttttttattttacatatctcaatggcaaccagctaactacatacagaatacctgcacctttacagtaagaatatatacctactgagtatctcctcttttaaaatctactggagagggcatttttcttttggatatgtataaatgtgaaatgagtaattttccttctaatacctctctgccttttactttcatgctgattatatctcttcttgaagttgtctattgtaaattgttagatagagcctactttcaggccaattgcctttttgcaaattacccttagtgtatctattattaggtaaatattttattttggcaaacttactgcagatgttaactcttttatgctattaagataaagtctgaatcagaagaggcagcagggtcctccataattgtttctgagttcaatctcattaaaataaaccatttattaaagaattctctgagctggaagacttacaagacagaatcttatcccctttgtcatatcttgttttttaatttcatctataaactccacaaggctaatgtatttaagctttctccatgagcaaactcttcaaataaagcctctcaattggcacctgttgatatggcaggaaatgcaattttctttctttttcactgtaaccttttataaggaggggtatgtacgtggctaggacttttccactggaagatgttaatagacaatccctctgaatttgatccatctttacccacaccagaccgtttaagtctgacacatagttgtaatagtattaatttactatatttttaatgtaaaagagagtatacataaagactgaaccttaaaggacatactctaacagtagagttaacaaagtcattataaaaatcaaacagtgggtgagaaaaattgtcaggactgggcttcttattgctgagtgaaagatagcaagttatcaaaggtgacccaccatgtgtgacacagtctgacaagaagaaaggtcattttatgctgattatgacttttctatctgatcttatgagacttctacttctcttccttaaatagatggagagtgatagtgaagagatgaaaaagagagatactttagttctctttgggaaccttggaactgaagaaggaatgcagcgtactgttttctgaaatctgatactagaaaagacctagagcgatttggtaatgatgggatttagtatgttcttgaattccctaacttatatattggtaagcatgctatattctgtttttaaaattttatgctttcaaccacattatctatacttttatgtttgcacaaggcaatcagaaagatataaataaaatgtaaaatgatgtggcttttttaagagaaagcaaaaaaaagagagatttccaataataaaaagatggtaaagtcaaaatatatttagtgcataagacaaagaggtacacttaactctactaaatttggggaaataaactaatatatttaaactgtttaaaatggttttgcagggctgaaatttatttctagattattttaagtagatttccagatactttttaaatttaaaaaaatcagattcagatgacagattatagttcaaatatctatgaagaaaactacatttgtaggaatgattatcatggatgtttagaataaccaggtcaaaatttattataaaataaatgtatgtttttacataactaaaatttaatgatatttattttgctgtaaatgtaatttaaatttacttactaaaacatcacataattttttaaagtatttattttttaccattttcatagagggtaagatttttttaacagatgtctataaatacagatagaaatctttgtattttcaaatttcagagtgaaagggagttcacatttctttttatttaagagaaaaattgtgagtagtatctaatcaggtatgcaatagtggaaatatgcctataaagctcacgtagttaatcattcattcaattattctctctgatttcatgtgctcttatatatacaacattttacaaagcttgtggcagattaaataactttaaagattaagtatgttttatataaggttatccatcattcagagtacatgtgaaaaagcttttgaaaaaaaaaaaaacctcaactacattaggcatatttcactgactgatagctttacagttaagatttgtcagcattccttttgtaaattaaattaaatttgatcaaaagctcactcctcacgtagcaaactgtaacctaacttgagggtatatttttatgaaagtaagaaaatcttggccaattacagtagctgagctttcagccagtcacagaccgccaactgcctagacatgtccaaataaggaaaacacaaggtgtaaccaatcaggctaatttgtgtgtcacttctattttctgtctataaatattgctggcccaggttgcttggtggacctcattgaacatttactggttataagtgctgcccaattcatacatgtttcctttgctcaaataaactgctaagtttaatttgtcaaaagtttttagtactgtgaagcttttgttttacgcttgttaatgttttatttcatatttttctctttgtcatgttttattttataatttatttttattatagtgaaaaaacacataaaatgagatctgatcccttaacaaatgtttaagtatactgtacaccatgagcacatgtggtgtagcagatttcgagaactttcatgtgtgtaacagaaactttatacccacaaaccgcaacacccccaattctctctccccaacccctggcaaacacgattctactttatgcttgtatgagtttgtccattttacatacttcagtaaagtggaattgtgtagtagtttttattctgcaatttggttatttcacttagaatgacatctgtaaaactaactgatgttttcacatatgaaaatatttcttttttaagatggaaaaatattctataatatgtatttatattttctttatccatttatcagttgattgacatttgggttgcttccacatcttcattattgtgaataataaattttttttaaaaaattatctatttctgaagtattaggactaaagtgaggttatatcatggagatacattatggtaaatggggaccacatcagtggctaagataaaacagtacagtcaggaagtcacacatagagctgggcatttttttttcagtacgcatacttttgtcatggaagattacactacattgtgattctcatctggggattattgttaagaagtggggcatttcacagggaaagcagaaataattcagtatcaaagtaagttttggatttcactgcaaataataacataaaattgaaataaaattattggccaacaggaaatctatttcttaggattgctccattcttaatcatcacctctttatttcatcgctttctcagttctaacgtgctttttgttatgtatatatatttaatttacccattcatcattttcttttctgggcttgaaattgttaaacaggaactcaaaaatatttgatgtgacctatatcaactgatagttaacactgggttatatacattttctcttgaaatacaactgaataaagaaaattccacaacacatatgaagaagtattgaggttctaaagaagaaaatcattctgtggatcttgaaaaagtgaacaaattaaaagcattattacacaattaattatctgccaataataacagaacatatagaatatttctatgtaaacaatatgacgaaggaaaaggaaaatatataaatggtatgatgaacattggatctctaaatttgtataagagaaataagaagaagcagtatgaagttataaaagatttcaaatagaaaaaatcgtatgagtcttgtaaaattaatgatggtaacagtgaaagcacattagatagagaaggaaataaattccatttagtacaatttccacaaatttcctgagaatgtaaatataaataagtgaaataaaatatgaatagtggttgattgttactgaaggaacaacatatgtatttaatatacatcatctctatactacatgactgaaagttgtgaatggaaatgtctaatgctagaatgtctcctagaggttcaagtgtcagaatttggttagatctttactgaacagtccactgtcctcgtatctatgtatattctggttaacctggaaagtggcaataattggtttatttcattcacatatgctgaaagaaagggttatcctattgatgttaacaccaactaatctacaaagaaagagaacaagataaacaagaacaaaattcaaactcctcaaataaatacttactaaatgttattacaaataattgactatacatttagggaaaaatttttactatgatttgcttaattttttgtcccttttgtttgacatttatattatgtacttttgagtaaattatatgagtaattgttattcttatatttttaatgaaaagtcaaattatagttttcaaactatatcagacataaatatgttgaattttcataaatccattattttttaagacatggacatttacatttatttctatagaaatatttttccttttttagtatgtgattcaactgtcacttaacctctctgtctcctagggactcccactgctttgctggttgctttacttctcagcctccataacatcatggacacatgtcatttttatctaccatatatttattaataagttatctacttatgtctaactgtcagactatgggataattgctatttcttttttttttttttttttttttttccgagacggagtctcgctctgtcgcccagtctggagtgcagtggcgcgatctcgactcactgcaagctccgcctcccgggttcgcgccattctcctgcctcagcctcccgagtagctgggactacagataattgctatttcttattaatttttgataatatatgatccatcacagtacatctagtgactgttaaaaatttgtttaatgagtaggtgttatcttcagagtgaggatgaagggaagtatttagtttaaagcgacttttacatcaaaacatttcaattacagctataataattacaaattgcgaaatcttagggaaaatacattatgtttttcctcacttgcagactctgataattatgttttctatggtatgctcttttggatgtttactttcttcgctgtactaaatattcggggaagaaaaatctttgtttattcccaagtgttaatcttttgggggctacccgattgtgttacttccatttcccttgcaagagattgacttagaatggaacatgagatctcctcctggcaattaaggtgctggtggaaatctgtgaagaaggaactctgatttctatgaacattttcgaagtctctgtatgtggagtgtagaaatgggttgcctagaactactgtagtcatctttggacgatgcagtgaggtagctggcatgcaaaccgttaaacaccatcttgtttgagtaataaactgacagactatgtttgcagttggagtgaattctaattgaatgttattatatattatctcacactttaatttttcactcttgatttttatttttcagcatctatactcatataatgcggtgtctaagcacacattttttaaaatgtattatgttttctaccttctttacatattaatgacaaatattttgtttgtatttctagtatgtattgctttaactttttgctcccctcacccttttctctctgtctctctctcaggtaacattaagctcttcttaggaagcattcttttacatccaattactatcttaaaaaataacatactatactcttagtcttgctcctagttctgtttttttctgtatctatcttcatggaaacatactagcagaggggctagacaatgctggagagattgatttgaggttattggccttgatcagtttccagataaaaaatgcaaacatactatttaccaagctatgggaaacctgcaaaaaggaaaagagaagtcctctgatcactcagaaattagagtaatgtgtggagtttatcttttggggccgtaatttctgtgtgaagactggctgacttaaagggccaggagtggggtgggcaccaactaaatcaattcattttgtgaagattgtggaatgtgcatttaccactatcaccgtaaattacttttaacagcatttgtttcaccttacattacacttaagttatcaataaattccctcttcaggcaatgcttagaattcaagtatagttttttcttgccaaaatttatctaactaaatgtttattcctaaatagattagtaacaaataaaaataaatcagataaataaactggacagtaagatgttgaaagatgaattgaaaggttaattttttgtagagttctcctaaaatctcacttacaagagctgaaggaataaaaagcagtcttctaatagcaaaagcaattttattgtcctgagtacctgccaaggacaaaaatgtgtttcttgttttattaacatttgctttacaactacaaagcaattgggatcataagcaatacatctcccccttctggtgaggtgagttttgctgtgggtaagtcaaagaaaagcaagtctcatttttgtaattttcaggaagattgatccataaaactaggaatgagaagcaagaaaatattgactgagacctgatatccagtaaagctatgtggcacagccttgcagactctcgtggcatattgaaaaatagctcaccttcttggaattttttttttttttcccaaaacgtgaagagtcactatatttgcattcatcgatcagccacacagccatcataatgcaagtgttttgtcatcttgaatataatgtactggaaggaaatgagacaagggtaaatgactttaatggttttcaacctttcacaggacagtctttactatcatggctactagtttgacaatttctatttagtcataacaaaaatgggattgtatgtgaaatgtgtttttccattaatcaatactactcaagccctgctcttatttattataccaaaaagtaacttaaaattttaacatatcactctttctacttgcttgataaatttctatttagtcatagcaaaaatgagattgtatgtgaaatgtgttttttcattatacgatacttctcataccctgctcttgtttattatagtaaaatgtaacttaaaatcttaaaatatcactctttctacttgttataaaaataaacatcacatcatactcatcctctgaaatgtcttttacatgtgtccctttctgtctagtcttgctgatactgtattggcctgcaccattgaattcattctgaggccgactggagcacaggctttccaatgatcccttcataattggcttttgacttacccactaactgatttttcctgaaatttaggatttcttattgtgtcactctgcagctttaaaatattaattgactctatatagtaaatattgctgaggtttgtaattctgcctttcaaagccttgatagtttttatcactgtgctgactcaattgtatcactccctaattttctgacttgcagttttaagttacaaacaactcattttagaggaagtaactcttgtacacataaaccaccatagtttttcatattctcatgacttcatttgatttcctgtctcttaaaatcctcctgtctttactcttcttccagtccccacatcagttaaggatgaactgaaagtcaagctttcttaggaatcatgctttggaatctcttctgtaaagcctcaatagtgtcttctttcagcattgctcataggagcataaagctctattcagtggaatggtttattgcatgtgtattgcttcccagtggggtcgtgtgtacaaaagccaagactgtagagtcagtgtgagagaggacagggtacatacatttcctcaagcttcatgagggcagggaaattatatacacatctttattcccttcatagaattaatgccagtaaggaaacgtattttgggttgtttttatttgtttgaagtagtgggatattttggacaaatgcaatttaaagaagattatggcaggaataaagcatgttgactttaagctgtaactactcattgtttgtctgtgcagtacctaatgtcatgactcacatcccctcctcaaggactacagtttcgtttacagcctagtgtgactgcaatgaaattcagtctatgtcagcgaacctgtcaaattcaacatcatgtcctgtcattgtctccagagcaatgaggtgttactgtgattgatctgcatagttgccaaatacttgacatcattcagctatgccctgagctttgaatgagttcatggttatcaaacaacatatatgtatatatatgaaactatttaactggaaagtcttgtggcattaatattactaaatccattgtgatttgtgccaaatgtgtttaaaaagtgtaatctgtgatattgaatgggatatttgggctttaagttatatttcaaaattttgtatagctacagtgtactaactcatctttaggaaacaaagttctattttcactgccctatgataaaacttttaaaatttcatttcaaattgttaaaaagtggcaattataaaagcataaaaggttttacagaataatgtgtaatattaatatttctacatacaaatgactttttggaacattttactcattcctagctcaaatgcatgaatgattttttgtgaaaaaattaaagtcttgtattaaaagaagctagttttactcatttcattgtcattatgtctaaggagaaataataattatttaaaataatttaattaattttttgtatcacatttcctcaaatttctgattttgttattctacaacaaaccagtattttatgcatcatgaatgaaggaaacatagatacttccaataggatcatgatataattttttataataatttaatagttgcacatttggtgaaaaatccatttcactcttagagacttataaaattacatattactcttgagatgactaagaaagatgtgatgaatgaagttattcagttaatgtatttctaaaaatctttctgttgataattaaattctcttgaatcaatttttgattgagttgatatttatatttttatatactattatcttaagatatcttacattttaagaatcaaaattcttaagagggcttaattactgactctgaggtttcttaatattgtgacacctattttgcaagtttatgtgtattcaagcagacaatatcaattacataatgcctatcaacagccactaagtgattgtaaggtcaattctgatttcatgtatattgaaatgtgagaaaaacgtgtagccttaaaggatgaaataaaatgtaatagtgttttccttccatttacgaacaaatttaatgtaaataatttaatttcagacaatattttgtaaaaatacatttgttgaaaaattgttttggcattcttcccgaatataactttgtcactgttttctttttcagccttcgctgcagaggcagcttattcttatcaaataccccttaggtttttgtgtagatgtattttacttaatttatctcttataattaacttggggtcacgtggctaagttcttgctaaaagactgtgagcaaagggaaggcatatacctctgggttaaggctgttaagatccagtgtgcctcctacttccttccctttcaatctcgtggagaccttggaatctacacatgggaagacagtaatacaaagtgtgtagcctggattcttcaagtgcgtgatgcttgataagcttacctcggtaaacagcttatttttcaaaagcactgattttggcatttttctctgtttatgctgatctaggtaatgacgctgatggcaaatttctatataagttgggtcctatagtttataaactgtgaaatttatcatcattgaaatatgagattttggaattgaacaaaataatctccttctggtaaatacttaacatatttgtgagctgagataattttaattttgaaggaaaagaaattaccaccagttacatagatgatattgggaaccaagaatggttactctccctgctgctgctatgtaagccataccttctgattctgcttctaagtcaacaagtaaaaaacataaaataggctgggcacagggctcacgcctgtaatcccagcactttgggaggctgaggccggcagatcacctgaggtcaggagttcaagaccagcctgaccaacatggagaaaccctgtccctactaaaaatacaaaattagctgggtgtggtggcacttgtctgtaatcccacctactcagagggctgagccaggagaatcgcttgaacccagggggcagagcttgcagtgagccgtgatggcaccattgcactccagcctgggcaacaagagcgaaccttcgtctgaaaaaacaaaacagaacaaaacaaaacaaaaaataaataaaataataaatatgattattgtaaaagtttaaatatgaaacgttacactttggataggttagaagcatccaaatatatatgacaaatatattttgtttattataagccccaaaaggctaacagataaagagtttaacggaacagtacatcattccatttggttacttaaaagatataagtcttatttttcctttcttataataacttcacaattgatggcattacaggcaaaaattttttttaaagaagtgtaatacagtctcaccagcaggttgtcccttgcctctagcctttctgttcttgcctcagtttgccttctttgtgtgaagcctgagagtatgaacaggtgaatgtcatcctatgccaagggttgagttgcagctcttaaatcattccctcatattgaataaaaaataaatacacacctgtcagatatacacatacacaaacacacacacacacaaagcttaagtggacgtacagattttaattgtatcctccatggattatttaggggacacctgcataatttgaatatttaggccacttttagatgatgctaatactttgaaactgcttatcattcactttaaggactgttgtccatgagacttaaagcatttaaaactttaaatttatgtcattgagccacttacagcacatagaccatttattatagatttaattcactttttgggaaattttgtgattaatctgaaatgataataagtttacaacagacttagagtgtgatttatgaaatatttctttcaatatcaactttgctgcattttatcaaaaaacatttggtctggaagcaattaaaaatgtaaatgattattataggcacatagtgcagtactcacttaaagaaggttacactttagggccatttctgacttttcttaagtaaaataattttgcacttaaaaaactaaaatcaaattaccaagcagtgttggtcgccattaattttatagtgtaaagattaattctcttttatcttatgatttgtaaggtgtaatattaggaataaattgcaattgctaattcgatcttaggttaaataaaaagaaaatggctttttcatggtgttcaagacgaagcataaggtatagagaaaagtgtcactgaagatttcgtacttttaagaaatcgtgtaattttcatcggaatcatcaagcatcacattacaaatgacatttagctatctagatcagcttataaaatctttactaaaggaaattttgagatcatttcggataatgtgaaataaattataaattgagctgacaatttcattaaagagattgaaaattttatatatttgtttaattttccatataatggccttcactttttacacaatagcttaggaatttaaacaatttttaaagacaccctatagtttgtgaaaatatttttagaaccactgaacttcaagaaattgttttgatgtaatctcccactgtgagagcaaaattctgtagccatataaacactggtatcataaacaaaaacattattatcttattgattaatgaacctattaatttattcatttgtttattgagtaagtactttctattgtccacatgactcagtactcagttataaaatcatatcacgtgcatgtctacttctttcttatactgctgaaatacttaaaaaatgatatcttgaaagcagatttttaaatgatgtctacttcccctacattactggtaagaagttgaaaattaacagaatgctgccacgtgatttcatttcaacatcctagatctgggtgctattcttaaatatttgtcaattccaaaaaactaagttttacatgtctttccaatcacccagcttacacctaaattcccttctgtcaagtataacccagctattttgtaatcctttttttgtgctcaaatctgctcatttttttctaaattctttatttttgtttccaccattccagcagtcattttaacctcagtcccacactgagcttagatttctaactgtagtttgtctgcttagtctctctcatacttatttctttgatttattgttgattctgagtgcttcatgtaactagtaaaactttatatagcatttttattattacaaaaatccatctatgttaattatagaaagcttagcatatacaggtgagacagtataaaaattatctatcacctttgcactatgtattcaagtattgctaaacattttctccacctcttgttcttttcatccataaatctacctcgcttctaaataatcgtataaaacattgtagcatacatttatatgagccttgtgatttaatctaagtataaaaatttatgttttattcaattttatgaatatttatgctgtagttatttagtcctagttttgggcacttagatgacttccaaatgttgaatttactaaaaacatgaagcaatgacaaatgtgcatttttatgatttccttctgattaagagttagaaggattctgtattaaaagataggaacagttttcctgcatatggctagccagttttcccaacatcatttattaaatagggaatcctttccccattgcttctttttgtcagatttgtcaaagatcagatgattgtagatgtatggtgttatttctgaggcctctgttctgttccattggtctgtatgtctgttttggtaccagtaccatgctgttttggttactgtagccttgtagtgtagtttgaagtcaggtagtgtgatgccaccagctttgctgttttgcttaggattgtcttggctatacaggctttttttttttttttggttccatataaaatttaaagtagttttttgtaattatatgaagaaagtcaatggtagcttgatgggaataacattgaatctataaactactttgggcaatatgaccattttcacaatatttattcttcctattggtgagcatgaaatgtttttttcatttttttgtgtctcttatttccttgagcagtggtttcttgaagaagtccttcatatgccttgtaagttgtattcctaggcattttattctctttgtaacaattgtgaatgggagtgcactcatgatttggctctctgtctattattggtgtataggaatgcttgtgatttttacacattgattttgtatcctgagattttgttgaagttgccttatcagctaaaggagattttgggctgagacgatggggttttctaaatatacaaccttgtcatctgtaaacagagacatttttacttcctcttttcctatttgaataccttcctcttgcatgattgccctggccagaacttccaatactgtgttgaatagaagtggtaagagagggcatccttgtcttgtgctggttttcaaagggaatgcttccagcttttgtccattgagtatgatattggctgtgggtttgccataaatagctcttattattttgagatatgttccatcaatacctagttaattaagagtttttggcatgaaggggtgttgaattttatcaaaggccttttctgcatctattgagataatcatgtgatttctgtcattggttctgtttatgtgatggattatgtttattgatttgtgtatgctgaaccagccttgcatcccaggatgaagctgacttgatcatggtggacccctcccttacaacttatacaaaaattaactcaagatgaattaaagatttaaacgtaagacctaaaaccataaaatccctagacgaaaacccaggcaataccattcaggacataggcatgggcaaaggcttcatgactaaaacaacaaaagcaatggcaacaaaagcaaacattgacaaatgggatcaaattaaactaaagagctcctccatagcaaaagaaactatcatcagagtgaacaggcagcctacagaatgggagaacatttttgcaatctatccatctgacaaagggctaatatcaagaatctacaaagaacttaaacaaatttacaggaaacaaacaaacaaccccattaaaaagagggtgaaggatatgaacagacacttctcaaaagaagacatttatgtggccaaaaaacatatgaaaaaaaagctcatcatcactggtcattagagaaatgccaatcaaaaccacaatgagctatcatctcacaccagttagaatggcgatcattaaaaagtcaggaaacaacagatgctggagagtatgtggacaaataggaacacttttacactgttggtgggagtgtaaattagttcaacccttctgtaagatattgtgttgattcctcaaagagctagaaccagaaatatcatttgacccagcaatcccattactgggtatatacccaaaggattataaatcattctactataaagacacatgcacacatatgtttaatgcagcactattcacaatagcaaagacttgggaccaactcaaatgcccatcaatgatagactggatatagaaaatgtggcacatatatgccatggaatactatgcagccttaaaaaaggatgagtttatgtccattgcagagacatggatgaagccggaaaccttcattctctgcaaaataacacaggaacacaaaagcaaacaccgcatgttctcactcataagtgggagttgaacaatgagaaaacatggacagagggaggggaacatcacacatcagggcctgttgggtggtgagcagctaggggaaggatagcattaggagaaacacctaatgtagatgacaggttgatgggtgcagcaaaccacgatggcatgtgtatacctatgtaacaaacctgcacgttcaacacatgtatcctagaacttaaagtataatttaaaaaaaaaaaagatgtgaacatttttgagaaatttttaaactgcaatttaacatatgtttgatatttgaaaacataaaaacaaaatagagacaggaaagtccaatgagggtgaaaattacccagtcacacttcgctagcataactacttttaactttccttcttacgtgttttcggtaatatctgtatctaaaactatacctttatgcctatatacatctgtaagaaaggaaaaaagagaataaaaaaactctatccatgtaggtatatttagatatagcttatatatatacatataaatatatacttctatacctatatctatttacctgtgtcagtatctacttataggtacataaatatatttctaaacctatttatatatgtacatctatatgggtatatagagctttttttctgtttgtctttcctcacatcaatcaggattttcctaatagtttttatattactgcttcaggtgatatcttttaacattaaaattactgatttagatttttctacaatactgtatttttactaattcaaatgtagattttaaggtgtcattactttaattttcatttgatttcaacaagtatgaatttgactacgtttacttcccattctattcagttttattgcatacttttttttttttttttttttttttttagacagggtctgcctttgtcacctaggcaggagttcagcagtgccatcattgctcgctgctgcagccttaacctctcgagctcaagctgtcctcccacctcagcctcctgagtacctgcaactacaggcatgtgccaccatggccagcatttttgcatttttttgtagatatgggggtctcattatgtttccccggctggtctccaactcctgagctcaagcaatctgcctgccgcgacctcccaaagtcctgggactacaggcatgagctaccagatccggaccatacattgtcttttaatgttgtctatcctcttatattagttttatgctgttactctgaaaatgttatgttttaatttttagttcaattgtatttatatatatatataaaaccgtcatacatatgctttgagaatatgcattatatataatatgtaatatgcattgagaagttttttaaattttccgatattttatctttatttgccagcaagatttattattaaaaatgtaattatagcaacatttatgtcatttctctacatgttcagcattcttttcatctattataaggaaataataaatgcttgatatggaatgttttatacataaaatatacaaagtaatgctatattgagcatcaatttacctgtgactcaactaaagaaggaaaatagataattttaagtcaagtcaatattttgttgttggtagaccttttcaatgagagtcctatttgaactattcttatctcccactcttctttgcagtaatattccctaagtaacagactttactcatttttgactgagttgtgatttttaaagaatatatgtttcaaaagatcaaatgtgaatttctcttttaccttctctcttaccacttagtctattgacacagtctcctagatctgcaactgctgtgtttacgtacagattaagcccaacattagttaaaattccgttctatgcttagtattcatctaatgcacagatgtttgtcttccctctcagtaaaatatatttctcatacaacactctttattagtctttcttatttatctagttgtttgtttctgagggttttgtatctaaataattttggaatgataatggttgtggaataattttcccatgttctctgacagtttcagaaagcagtaactgcatagcagagggcagagggatagagctccaacttagtattagaagttcataggcttgaggccgggtgtggtgtctcatgcctgtaatcccagtactttgggaggccgaggtaagcacatcacttcaggtcaggagttccagaccagtctggtcaacatggcaaagccccatctttactaaaattacaataattagctgggtgtagtggcgcacgcctgtaatcccagctacttgggaggctgaggcatgaaaatcgcttgaaccccagaagtgaaggtggcagtgagccgagatcacaccactgcactccagcctgggtgacagagtgagattctgtttcaaaaggaaaaaaaataaaggaagttgatgggcttggatactagtctctactgaaatacaaattatgtcttttaccctgtttggaaaagatttacttggaaggaaatatctggctaacacatcctattaaatctagtttaatagctctttctgcctttgaaggaaagttgggaaatgttgctataaaggcatttttttgtatctaaatgaattttccaatgctgtcgtattgctgagaaattttgtgtacacaaaaattttaagtaggaaatttttttttcaaaaactaaagtgatgaaatatacaatagtatcctttttagatatcactcagccccacaaccacttgtgagtataaaaccttgactgcgttaatatgccccacaatatctgaacaatgtcatctctgaaattgaactgttgatgcattgtgatccatttactgcaatatatggcaatagccttttgatccaatatttggaatacattaatttccaatatacaaaaaatagaaatatacaattatatacaaatatataaaaatatacaaatatatgcacaaaaaatatacaaatatatacacaaaacatatgctatatacaaatgtatacaaatatatacacaaaaatatatacaaatacacaaaaatatacaaatatataaatatacatatatatcaaaatatatacacaaaaatatgcaataatttggaaataattgggcctatttctctttgtctttatactgtgccaagagatgctaatgtcttaaactcagccttttgacagtgataatttaatttttaaagtgttgctttcaaaatctcccaccacactaattttggccatatcaaattaaaaaccatcagactagtttatattaacaattcctaacatttatatcaatctgactatccaacagtcaatatcataacacttttacatacattaagtagtttaagctctttgaacacctgtcaagtttggaactagtatggtctccaatttatttataagacactgaaacaccaagaagtcaaatgacctacctcatgtcaacaaaccaccaagtggcaatacccaaatcagaagcctgcttccaggtcctatttgtctgatttctcttgtttatagcagaatgcctgaaactggttatttataaagaaaaggaatttatttcttacagttatggaggctgagaagttcaatgttgaggagccgtatcaggtgagagttggtagggactctttgaatagtcctaaggcagcacagtcggccagcagactgaggatgctcgtgggcttgctcccttctgtcatccgcttctcataaagacaccagttccactccatgataacccattattccatgaatccatgaagagattaatccatttgtaagggcagagcctcatgattcaatcacctcttaaagatcctgcctttcaatactgccatatattttatgatggcagtatatatatatatatatatatataaaatctagcatgttttgtgtatgtatgtatgttttgtgtatatatttgtattttttatatatttgtatatttatatatttgtatatatataatctagcatatgttttgtgtatatatttgtatatttttgtgtatatattttaatatatttgtatatttatatatttgtatatttttgtgtatttgtatatattttgtatatatatttgtatacatttgtatatagcatatgttttgtgtatatatttgtatattttttgtgcatacatttgtatatttttatatatttgtatatatgtatatatttttgtatatataatcaatcatgttttgtgtatatagttgtatatatgtatatatttttgtgtatatatttgtacttttatatatttgtatttgtatatttatttttgtgtatatatttgtatattttttgtgtatatatttgtatatattgagtatatattttgtatatatctagtatacatatatatatatataaagtctgacatatgttttgtgatatattttgtacttgctattgtttgaatgtgtccccttcaaagtttagctgttgccaatgtcatagtattaagacctggagctttaagaggtgattaagtcattagggattctccctcatgtatgggattaaggctgatgtaaaagaagcttcacacaatacttggctgttcttctgccgtctgccatgttaggacacagcatttctcccctgcagaggatataaccctcaccagacaatcaagcccatgagaatctttgtcttggacttctcagcctccagaaatataagaaaatatatttctattgtttataaattaccaattttcaggtattttgttacagcaggacagagtaagcagaacttatgtaatattgggttattcactcattgcatagttactgaacatctacttttttgtggacacagtactagctactgaggacactcagaattcaaaatagaaatatctgctcttctggggtttatattttagggtatgggttataaaattataattggtttattacttcaagagaagaagacatcaatcataacacattaaatatctccatgaataatttcatttctatggaaactgttgaggttcatcgaattattttgtaacggtttgtcagcttcttataaagtttaccatatacatatgatttgactcaccaattctatttatttaccaaagtgtaattaaacttatgtttacataacatggtttgtaaaagtttgtaattataatataataattgaattaacacgctgaaatttctttcaactgctaaatgaataaacaaactatgatacatttaagcaatgaaatactacttagaaagaaaaagaaatgaacaaaggcaagccaaatgacaaaagcaggaacatgaactctaatgcataatactaagtgaaagaggtcaggcttctatatagtacaattctggttttcttcagtgttcctaaaatatatgtgataggaaacattatttgttacaactgttgaactatttaatatagtctgccctgcttaactatatgtagattaaaaattgtctttaattatctacatttgaaattaatgagaaagacaagtcaacaagtaataaccaaaatcgatgtagttggaaatgagagcaaagctctgtatcttttgctatttaattccctgagttctccatctgctttttaatacagtggctcttgatgtattatgtttcttggacacttagtcataaaaaaatgagaaaaattaaatattgatgttcacagtaggatagttgcaatatttcataggcttttaccaaataagcaatatttctgcttgccaggacattctctgttgatgaaagattatttttcttctcacttgaaaggaaatctgaaaagtcattttaaactatatttagctattatggaactatttacttctttttttttcagaagcaaacagatgtgaaatgcaatagaattgttgacagaatcggcttttcctggtgacaaatctgatgatttcagtgttaaaacagccttgttttatgtagaaacatggctatattctaattgaaatgtttggaatattttatgactgaaaaactgttgactccttgtttagtaatagatttatccttccactgtaatgaaagactcaggtgttattaaagtataggaattgacaatcgatcaacagatagataatatattacattgccccataactaatgaataaaatgtattatctcttatttagtgggaaaatatatatcaatatctatatttttatttttaaaacattttcctgtcaacctctaagtaggtatgctctggaatataacattaatgctttagaaacaattcaactaaacaatccaactctcttttagattttctactaaattcaaggtcatttatgactaaagtaaatggatgtagatccaagtaccatcatttatttttttcactggttgacatactaaatgtcaagagattcttcacagaccaaaaacaaaaagtaatttagaaggcaagattgaaaacaaataaacaaaaaataaattaacaatattaaaatgaggaagtaatatatgtcctgagtcaaaaactattggaaatgtttcaaggcactggagatttaccaatgaacaaaaccacatagttttagaaatgctcgttcggagaaactgtgccttgttttgcacatgacaggaccatgtgtgggattcatcatttgaccttgatccctgtgagcttcctgactactaagcaagatgtgatgcatatctattttaaagagataaatagtgaatatttatgatatgtatcaaatgattacaaaaaagcgagaggactatatcttaggaaaataaaaggaaacttccaaaaatatcaaagaaagacaccatgaaattgttttacctgagagagtcactgaaggacaattgaaattttaataaaaagggaaatgtggagatatctaaaattaggtaaattataatatattaagtgtttgccatgcagcagatattattgcaagcattttgtaatcattatttctaacattattaaacacatacactactattgctgcttttgtaaaataaggcaaaaaagtagaggcctgggactaaatggcctattctaagttaattgatctattaaatactagatccaggattaaaactcagactgacacctgatcttgctctccaaacaatactgctacattgtataaatattgcactggggataaaaagatatcatagtggtaatagataggttaaaggcatattttttactcttaaaatttacataaagtaaaaaagaaaaatagggctagaaaaacataatgacattggattataaacaaccatggaagacaagaaatttgaatttaactctatatttaatgagaagtcttttaataaatgaatgaataaatacaaagtgtactaatgactattagtcattcatgttccttcatctgttctttcacacactcatttgtttacaaagtttaaaaaatggtttacggaatgtgtattctataccagactctcagttacatataagaatcctgctctgaattagagaccttggcagctgtaaatacttactagaaagattttgaaagtttggcaaaaattaaagttgaacatgaaagcgacacttttgggtgtggtatactgttattgttacagattgttgtagtatataaaattatttatatcttaataaagaatatatgtatatgaatacatatgtaacagaaatacacttaaattatgtacaattttaggtgaatatgattatacattttattgcagacttaattttcttttaatatggagataatatagataggtttcctcctgtctctgtcttatctatatcagaccgttatccctaaaatgcaacgtcaccttgggttaataaactttttattacaataaatatgtacggatctgtctgctaggactgtcataacaaaatactatagaatgcatggcttaaatgacagaagtttatttctcaatgttctggaggctgcaagtctaagatcaaggtgtcaacacatttagttttccctcaggcctctcattttgacttgcagatggtttatttcttgctgtctcctcacatggctttttctctgtgcacaagcctccacagtgtctcttcctcttcttatcaggacaccactcataatggattagtgttccacctctatgatttcaattagcctggattacccctttaaaaataataactccaaatacagtcttgttgaggataaggacttcaacacatgagttttgtgggaacacatttcaatccataacaatgtaaaatatgttcacattcaaatataaagtgttgactattttttaaaataagctgttagacacaattattacatcatgattttttttcacttcaaaatactttgtatacaacattaaaagtcatttcacattgatttaaatttttgcaaggactacatatatttcactgtatggatatagtcatgatttattctcccatcttcctagtaatgagcatacaatatgttggccatgtttatgccacttcagcttttgttcagtaaatatctttgcatccatacttttctgtattggaacattagattttttgtattacaaattctcaaagtgcaatctgtggatcaaacgcttggtgcacttgggtttcagaagaaattgccaacttaattttcaaaaggcagtaaacttggcatttccaacacataccagatagtaatccttttatcatagactccaaaacaatagggcttataggtctttattctattttaaaaatcactcatgtgtttgttacttcgctacaaatttaattttatccttaatattagtaaattttagtattctttatttgaattagcatcgctgaaaattgaattatataccttttgctagtgtttaaatgctttctcttgtcaatttataataattatttgaagattatgcacaactttatgactaccacctgcttttaaattatttactgggataatatctcaattggtgatatgagaatgtcagctagtcattttcttttctttcttttttttttcaattcaggaggctatttcaggatcagagcttgacataggctgaggtctgctgatgggaaaagaaaaagcagcaaatttcttagtagctgcttggggatagaatgattgagacatccagagacctcaaattcataacttttttattttacccaaatatacatttgctaaattgtgctgcatagaaagataaagagttaggctgtaaagttttcatgctggctcttaagaaaccaaaatctgacaaagccagaaggcttaacaaataaataagcagaccagaaaatgaagtcctggagatagtggtagattaactctgaagttccacaactgcttctcacttgggaacacttagtgattatgggtccaagtagagaatgcaaatcaggcttggccctgctaaaagtgacaaggaaatcagcagcacacacgtggaactggagggagaagataggagtcttgtaagccttaaagcataaacaatctcaccatcaagacatttagcaaattttaaaacagcatggaatgaaaaatcaaagacctcaacagaagcactctgaagtataaaactgaaacttctggagtgtatcagagcagtggaggcagagtgctgccctgttccaaataaaaaactccgaattaatcaccctaggaatagtggcattccacaggtgggctaacttttatggaacttgcatcccagtcacaactctgcataacctctgattggattaatttggtaatcacaccctaccacacacatatacacccccatccctgtccatcatataccccacaaaagtaagttgcaatcctatttaatagaagataacttaaaggctttaattttattttatacataatgtctaacagaaaaaagtaaaaattactagacatttgaagaggaaataatacatgaacagtagctaaaagagtaattagtcaataaaaacagaattgcaggtgaaccagaatttgcagctagtagaacataacattaaaataaatatgatatcacttttgagaaaacagggagaaatttggacaaaaatacataaagcaatgcataaattagccccaaattggcaatgatgagtatcaaatggggtttctagatatgaaatatatgaaaaaggactaaaaatacatatatcccactaggcttggtttattgtccttcgtgatatagtctaaaatcttttgttttccattattttttcaaatattgcttctggatcatttctttcatctcctgttagggtccagttaaatatatgttacaccatttacaggttttgtatgtacatattcttcagtccttttttgtctgcgattcaataaataattttataaacctgcctttcaggtaattaattttaccttccattatatttaatctgttattaaactctttttttagtgtgtgataggaatactgttttcactgaaagtttactatgcaatgtattttatttttttagacgaggaggaatatcataagcagttgagggactaggaagtggggagatcaggaagtaggtcctctagagatgaggaggcactctgctagatggcttttaaaatatttcctccagaggaatttgcctcattaacagcattttttggtcttaaaaatcagtctttgattttatacaatgacaatttctgactctgttataaaggtatgctgtcctagttcttccgtaagttcatcacgtgttttcaccatgttgtcattaggcatgttttctgcagtattaacatcgtcttcattgttcctattatcataattaccatgattcttaaaaatgtcagctagttctccattggtcaatgaacgaacaactggagcctcagtatcaacattaaaaatgtcttcaatatcaatttctttcagtttatcggattctgaaggtatactttttgtatatttaaggagataagacatctttttttcctcacttatcatatagaatctttcaaagtcaccatcttgttcatcaacaacattaaatttagttactggtcagaggtggtgccaggaatgcacaacagtttctttagtcactgtcttccaagcactggacacatcgtagatggtgttcttcatgctaacttcttttgaaaattgtccacacctatgcctctattcactaacgctagcatgctgttcaagagagcttcttcatatttgctgtttattaatctaaatatatcctagtcacatggctaaattaatatagtcacatttgggtgaaatttcatgaacatttttgatgaaaagttcagctgtagaatgagcagaacacttttcaagaaattaaaaaaaattacagtgtcatctagtctggcttccctgcagagagcaaggaccttgctacaaaatgtttgtgaaattaatcagacaagttgtccctggtgatccatacctttttattagcatgataattagctgataacaacttcactacttgaaaacagtggggacacaggcctttgtctatctcaaggttacacttatgtttgcctgctgcattagcacatatcagcacagatagtgtgtctttggcatttttaacttctgtcagggatatctcactagctgtaatcagtgtctttctagagcaataacaccaaaacagtgatgttccatcagtattgcaactttgttctagtatcagattttcatcagtgatgatcttatcaaactcatcaatgaatttctttgttgcttcatgatcaacagatgctttatcactataaaatttaaaaaatgtaatatgtcctttcttaaatttatgtaattagcctatagaataaatttcccctcctttttcagtttcttgtgatagatctttgctgtttcatgattagcataccatttggtggcatgtattcactgtggtgctgaaagatcatctcttacagtacacattcaagagctttatttttagttttatataatgtccttataatttttgttaacttttgttcaacactttttacatggaacaccaacaatttaagcttctgtttcttcaggtcatatatggtgctccttccaacatcatactttattgtaaaacatttcacacttacaccactgactagtttcttcaacaccttgacattctgtgctctagataaacataaatgatttctctttttattatcactggtacccataggagtgtctgcaggcctttttgacattttcaacaatatttttgtatgagacaactgaaaataaacagaaaaatgcagggagcaatgcacgaaggtcttggccttaagtgggccattgtgatgaaattgcccttggagtgtctggcctgcacacatgcctttttaatagacttagttggtgtacttgtgtgcgggaatcagaaaaaatatattgcaggtcaatggggctgttaagagtcctttatccgttggagacagtgaatcaattgtgcactgttcatctgcattttgactgtgatgcatgacgtgtgctcaggtgtgaaattttccacattcagcatcatatcggtgctcaacatttttaaaattttgaaatattttggatttcagatttttcagattaggcatgggcaacctatactctttttcagtttacagaataaacagaatcaatttttttaaatataaaatctgaacacagttaacaatattgatctggcatatttagaacaacgtgcacaacacaacaataattaacaacttgtttaaatgcttataagaaatttaccaaacctaccccatgttgggcaataaagataatatcaataaattttgaagacgaaaattattgtttgttttgtgaccacagtaaatttacttcagaaattgagaggcagatatccagacaattcccaacaataataataagcattgccttacaaataacccaatgtcaaagaaaacaccaaaatggaagcaataaaataattctaacttatccataataaagattcaacacatcaaatgttttaaaatgcagaaaatttagtaagaaatttgtaaccttagaggtatggattagaaaagaaaacgaatatctaaaatttagtgatttaatactttctttcaagaaattaaatgtaatagcacaaattaaacttacataaagtaaaataagataaattatacacaaaaacaaaaattaataacatacaataaaacattaagaaagaaaaaatcaaaaaagccatatgctagatgttcagttttaacaataaaaaatacgtattaaaactctaggggaaaatgtccaaggttaaaaagacaaccacaatgaccaatattaggaataaaaatgggatatcactgcagctatcataaaaagttaagaaacgcatctagtgttttctgcctccagttgctgtcaaagagcttctaacacctttgtaattttctaaactcgaaggctgctaggagaatactttgttctaatatttggtctttgaccccagttctagacacagagctactgaatcccttggaattttgggggatgatagaaatatcttttgttctaataacgcaattcttgttgggctcctatagtgggctgttcattagaaagaccaaggtataattataagattaaagagttcagccccatcccactttgctagagaaaggagagatgctagacatggagataataatcaatcgtgcctatatgatgaagtctccataaaagtccctgaactatgggattcagagagcttccaggttgatgaacgcacttaaattctgggagggtagtgcacacaaattccattggtctcaccacaaaaactcctgtgctgagacccttccagacattgccctatatatctcttcatgtggatgttcacctgtattctcattatatctgttattaataaattgccaaacataagtacggtgtttccctgagttctctaagcaatgccaccagattaatggaacccaagaagggggttaagaaaaccctgatttgtagccagttggtcataagtacagtcatgtgctatataatgatttagtcagcaagagaccacatatacgatgatggtcccataagattataatgtatttttactacaccttttatatatttagatacatttagaaacacaagttcttaccattgtgtttcaattgcctacagtattgagtatagtaatatgctatgcaggtttgtggtctaggagcaataggctatactatatggcctggatgtttagtaggctataccatctagattaatgtaagtatagcacactctataatggtcatcaaatgacaagatcacctaaggaaaaatttgtcagaatgtatctctattgtttagcaacacatgactacataggtgacaacctattgcaatgagtatttgaagtggagggcagtcttttgggagtgggcccttaacgaatatgatctgatgctatctccagtaggtagtgtgagaattgaattgaattacaggacacccagctggtgtcttctgcagaatgattggtgtgtgagaaagtacccccaaacatctggtgttagaattgtggtgaggagaggtgtgaaagtggaaaaaccacttgttttctcctattataggcactagataaaaaagtaaccaaaatctattctttaagagcttttaccaatatgtgatcagatgaaacttatgaatttcattttgaaaactcaatagagagggaagcagagcaagatggccaaatagaaccctccagcaatcatcgcccctactcttcaggaacactaaactgaacaactatccacacaagaaaccacctacataagaaacaaaatcaggtaataatagtacctggttttaacatcattatcaaagaaagaggtactgaagagagtagaaaacacagtcttgaattatcaacactacccctcccctatctcaagcagccacatggtacagagaaagaacttttgtgcttgggggagggagaacacagggattgtaatgttacatgggtactcaatgctgcctaacattgcagaaagcaacacagggcagaattcagccagcacctatgaagggagcgttgaccagtggggaactgtctatcacagtgggaagaacctgagttctagcaagcccctaaaccaccgaatgaagcactctgggcacctaaataaacttgaaagtcagtctaggccacaaggactgcaattcctggacaagtcctggtgctgcgctgggcttggagccagtggacttggggtacacacgacctagtgagacaccagctggggtggcctcgggaatggtttattccctcacccaatccctgacagcagagctccaagctctgggacagactctttccttttacttgaagagaggagatggaagagtaaagaagactttgtcttgaaagttggataccagctcagtcagaatatagtaagacaccaggcaaaatcctgagggccccttcctaggcccttgctccaggacaacatttctagacccaccctgggctggaagggaaatcagttcactaaagaaaaggacgcagttctggcaggattcatcaccttctgtctaaaaagcccttgggtcctgaataaacattagcaataaccaggcagaactctacgcaggctgagggagagaccaagggctatgctgacatcatgtgtgacccagcacattcccagttgtggtgtccatgggaagagtctccttctacctgaggaaaggaaagagaagtgtaaaggggactttgtcttgcagcttgagtaccagctcagctacggtggagttgggcaccaagcagatttctggggtccctgattccaggccttggctcctggatggcatgtctggactcaccttgagacagcgaggagcccactttcctgaagtgaagagacccaagcatggcagcatttaccacagacagactgcagagtcctcattctttgagtgaacattagtggtagcctggcagtattctctgtgggcctggagtagtggtggccacaagaatagattcctctgcttgagaaaagaacagagaaaagtgggaaggtctttgtcttacagcttgggtgttagctcagtcatagtataatggagcaccaggaagattcctgaggttcccagttccaggtagtgcctcctggacagcatgtcttgtctcaccctgggccagggaggagcttgccaccctgaagggaaggaaaaaaacttactggactcaatatctgatgactgaagcactcttaggccttgagtgaacattgttagtaggcagacaattgttgccatgggcccagtgctatgctggtttcaggtctcacccagaagtcccagtgatgatgcccaaaagggcgtttgtgtcacctgtccatcagctatgggcagctcaacatggagaactataggtgctctgattttctgggggaaagtaaggaagacaaagtatctctgcctcataatacagggaattatctcagatttttccaaagacaaccaaggcagtacctctgagtttgtaagatatagcattgctgggcttgtgcgagcaactatttctgaagtgacaaaagactcaagtccttttgaacacttggaaagccttcccaggaaagatgggtacaaacaagcccagactgtgaagattacaataaatacttgactcttcaagtctcagacactgataaatatacacaatcactaaaaccatccaggaaaacatgacctcaaaaatcaaagtaaataaggcaccagtcaccattcacagagtgacagtgatatgtgaactttcagacagagaattcaaaagggctgttttgaggaagctcaatgaaattctagacaacagagaaggaattcagattcctatccaatacatttaatgagattgaaatgatttttaaaaatcaaaagaaattcaggatctgaaaaatacaaaggacataatgaagcatgcagcacagtctcacaaaagaaaaactgatcaatcagaagaacgaataaatgaacttgaccataaactgtttggaaatacacagccagaaggtacgaaaaatagaaaaaaaatgaagataacgtacaagacatagaaaatagtctcaaatagcacatctaagagtgactggccttaaagtggaggcaaagagagagagataggtgtaggaatttcgttcaaagggataataacagagaacttcccaaatctagagaaagatatcaatattcaagtacaagaaggttatagaataccaagcagatttaacctaaataagatgtcctcaagatatttaataatcaaacccccaaagttcaaggataaaaaaaaaagcatcaagacaaaacaaataatatacaaaggcactccaatatgtctggcagaagacttagtggaaaccttacaggccaggagagtggcaatgcatacttacagtgttgaaggaaaaatgcttttatcccagaatagtgtgtaaccagtgaaaatatccctcaaacatgaaggagaaataaagacttttccagacaaacaaaatctaaggaatttgatcagcatcagatctttcctacaaaaaatggttaaggaagttattcagtctgatagaaggattgttaatgtgaaatacaaaatcatctgaaggcagaaagctcactggtaatagtaagcacagagacaaacagaatattgtaacagtgtaattgtgctgtgtaaatgacttatattttgagtagaaagactaaaagatgaacctatcaaaaatagtaaccataacaacttttccagacatagtataaaatctacacatggaaacaaaaagttaaaaaatgaagccaatgaagttaaactatagagtttgtgttggttatctctttacttgtctggttgtttgtttgtttctgcagtgttaaattgacatcagtttaaaatgatgggttatattatttgcaagcctcgtggccacctcaaatcaagaaacaacagatatgtaaaagataaacagcaatgcattaagtaataccactagagaaaatcaattttactaaaaggaagaaagaaaagaaggaaaataagaccaaaaaccaaccagaaagcagagaataaaatggcagaactaacttcttacttaccaacattgaatggaaattaataaaaccctccaatcgaaagatatagagtggctgaatggattttttaaaaaggacccaaagatctgttgcctgcaagaaacacactttacctataaatatacacatggattgaaaatagggacatagaaaaatatattccatgcaaatggacaccaaaagagagcatgagtacctacaattacatcaagtaaaataaatatcaaatcaaaaactccatgaagagataaagaaggtagttttaatggcaaagggtcaattcagcaagagaatgcaacaattataaatatatgcacccaacagtggagcagctagatatataaaacaaatattattagtactaaaaagagcgatagacctcaaaaagaataatagctggagatttcaacaccccacttttggcatcggacagatcatccagacagaaagtcaactaagaaacatcagatttaatttgcactataaaccaattgaatatttattgatatttaaagaacattttgtctaacagataaagaatacaaattcttctcctcagcacatggaccattctcaataataggtaatatattgggccccaaaataagtcttaaatagtcaaaaaaatgagatcctatcaagtattttttttctgaccccaatgaaatagaagaagaaatcagtaacaagaaattttggaaactttaaaaacacatggatatttttataaacaatatgtcccttaatgagaagtgggtcactgaagaaattaagaaaggaattaatcagtttttttaaaaaaacaaatgaaaatggaaacacaacataccaaaacctatgagatagagctaaagaagtactaaaaatataacagtaaacaactacatcaaaaatgtagaaaacctacaaatacacaacctaataatacatcttacggaataaaaaaagagcaaaccaaagctaaatttaatagaagaaaataaataataaatatcagagctgaaataaatgaaattaaaaattttaaaaatacaaaacatcgacaaaataaaagttgatttgttgaaaagaaaatcaacaaatttttagccagatttactaagatataaaagagagaataaccaaataaataaaaccagagatcaaaaaaagagattttacaattgatagtgcagaaattcaaagtaaaaataaagtagttgcttaagtatcattaatcgtctgaaattgtcatttgccacaacatggatagaactggaggacattatgttaagtgagataaactaggcacagaaagtcaaacatcacatgttctcacttgttacagctaaaaattaaaacaattaaactcttggagatggaggagaatgatggtcaccagtggctggaagtggtagagggggaggattggaaatggatagtaaacacaaaaatatagtgagatagaatcagtacgatctaatatttaatggcacaacagggtcgttccgattattatcctttagttataactaactttttaaaaccattttagttaaaataactaaaggattataactggaatgattataacacaaagaaagcattaatgtttgaggtgatggataccccattacactgatgtacttattacacattatatgtctttatcaaaatatttcctgtactccataaatatatacacctactatgtactcatcaaaatttttaaaaactcactatatatgacaatattagaaatagtaaaattactattaacatacaaatcctttattataaacctcccatatagaaaagcagagatagcttcacttctaaattatttcaagttcttttaaggtgcaaataacactaatttttcaccatattttctagaaatttgataaacaggtaagactttctaacaccttttatgatttattaataaaatattataaacattgaaataccattcttaaataaaatgttagctaaattaattttaaaaatatataaaaataatgataggtcacaggcagtggatttattctagcaatagaaggatgacttaatattagaaaccacatcagtatcagtgcaactcatcatatccatatgaaaaagttatttagtaaaatctaagcacacatttctgatttaaaaacaacactaatcaaaatcaatcttttaataagctcataaaatttattttaaataaactcaatttgatatatggtatgtcagtataaactacagacaattccactgttattatacatccaaagtgtccatactgagattaggttaaaaaacccaatgccacctttgacttctatttactagtttactggagttcctaaaaaaagagaaagaaataaaaagcaacattttcagcactgaaatacaatttactttgtacattgtacatacatatatgtttttttcagatgaaagattgtaaatataggaaaaccaatataaaagcactagaaaatcaggaagtgaatcaggtgagtttgctggatataaaaacttaatataaaattcagttgtattctgtacacagcaataaataaaaagtaataaaaaagttttgaaacctccaaaatgacacaagatgaagatactgccttacctgtgtcacatcacaagaaataaagacatcacacaccatagattttggtaaaattaattcagaaaatacttttaataaactcctaatttcaaataggattttacatgaaaatatatgactcatgggactcaaaaactcgacagtttgcaagtgtgtataggcttttgttctcagacctccactaggccttcctgaaagcttggattcagagtaatagactagagaaagtcttccttagtggttcatacctataggagaagagaaattctgctagaattctcttccccaatagaaaaaaatatatattaatcatctcggagtcacaggattcataaatgaacatgtcacttcagtcatttttgtaactcattatagcataacatttgcccaaatgtcatgttgaattattacctcaaatgttggaggagggtcctgataggaggtgattagatcatgggggtggatttcccccttgctgttcttgtgtcagtgagttctcaagagctctggtgtttaaaagtgtgtagcacctccctgctgtctctcttccttctgctccagccacgtaagaggtgcctgcttcccctttgccttccaccatgattgaaagtttcctgaggccttcccagaagccgtcatgcttcctgtacagcctattgaaccctaagtcaattaaatgtcttttctttataaattacccagtctcaggtatttctttatagcagtgagagaaatggacaaatacaccactattaaaactaggtattattattgatccatacctcacacctaaatttttcagttccaatattagattataactaattgtcagtacattaattaaatttaagggttgtctgaatcaccttgaagagaggctttagttatgtgtttatgagttgaatgacatctttcaaaaaataataatattgtcttcataaatagttacttaagcatcattaatcttctgaaatcgttaggaataatgatggaagactacaatttgcttcttaatactgttatgtggagttcaaattaagtcataaatcaaggaatttctaatttgctccagtattccaaagctcacttaaacaaattgttttacatacactctctaacatgaaaaatcccttaattttgtcttactatttactagattttactctaagaatccagttgattagttcagtaattagcctaggatcattgtataaaactagtcctacaagtttcatgtttaaaaacctgtttattgaatgttaacacattccataagaataatatccacttttaaaagatatctgaattaagttgcatgttttcatagcttttattatatggacatttattagcccacagcaccctcaaaagatctgaacttcgaaatctatgcagacattttcactctttcatgcttaaggataaagtcacactgtcctcatttggccacatgtagtcactttttgagggacaatgtgtgggggttgatttctacaaagcaaaatgtaaacatataatgaaatacatataagccagatgatgaacaaaacttcttacaaatgataaacaaacaaatgtttgttgtaattcattttttccctcaatgacaattcattttctttgtttgcttgtcggatttttctgattcacttgaacagcaagtactctcatttagaataattttctcaacatacatataaaccaatattttaatatatattaacttaaaaatagtgttctgttcatgaacaccatactatatctgaaggctttttaatcagtgcattttaaaattgtgttgccattctatccagtaggggacgtgtctgtaaaaatttgttaccaacattaggtgccatgggctacccctttagcctcagcaactcagaaggctgaggtgggggggctacttggggccacgagtttgagactagcctgggcaacataaaaagattcttaatttttctaaaaaaatgaaataaccagagctttgaaaaaaatatagtaattaacctgatggtgtaaattaaactgtgtgtattcaagtctatgaagttctttctattaaagccatttaaaatggagtcattaaacatcacagttttaactgctacattattatctaagcaatatcttttgaacttaccaaattaaagcaaaataaacatgatatttttataatacttatttccaggtccacattttcatagaaaggttgaaattcagcattgcccaaataatcctaaagcctaaaatgttagtcattaatatctcacatgaaagtagatgaatgaaaaatgtggtagaatactaattagctgtattgtaatctctatcttaagtggatatagtactcattagatttcattttaagatgaatttctcatgcacagtcattaaatcctattttcctatccaagagaccttcactgtcctggggacagaaggcagacgagttttcctctgacccatctcattctgtctttgtctgtgacaaagaaccagtgatgaaatgatacagccttcatcaaggccaaaagataattactcacaacatatccaagtagaaaaatttgcaaaaataatgcaatgtgtgatgcttaataccatgtacaaaaataaaaagtgtttattgcttttcaaaacatatgaaagagatgataatgaggagattcaccagtggttgggagaattccacaaaacctgaatgatggaaagaggagaggcctgtctgaatgcataaaataagctgacaatttggcagtctaacaactaacacagcctaatatagcttaatatcatgagtttgttctttggggaagttctatgctcagagttcaaacactcaattgtgatcaggagtgaaggtagtaacctccatctgtctcctctgcatactcaaatcagaatgaattcaacccacattccttccacacctcacaacaaactccagacaaaaccctaaaagtctgtccttacagtagctgtgacatatgaaatttcctcttagtgtggatgagaactctccagagttaagctatctgaattttggctttgagtgtctagtggtctgacagctggctctttgctcagtcaaagaaaaggaatttagatgtacttatcagtattcccgatcgaagacagaattattgggcaactaaatcacaatgcacacacataacacaaataaaaaaaaaaggaacttagtagcttaataatagtgatgtgtttgtatatttctcactaaaattataaaataaaggactctaaaaccatgaagaaatccctgcctaaataatagactacctcaatagaaaaacagaaaactcaagctataaaagaaaagctcaaaaatcaaacaaaataaaccaacaatcacaccaacaagccaagtcaaagaaaaataagcactaaggctaccctcaaaataaataactgcatgtaaatacagatatacaagaaaataataaaataattataacagggtgtttttaaaagtaaaaaaatggaaatttcttagcaatataaaatatatttaaataaaattaatataatttggaaaattaaaactgatgaaatacctgagaatacagagtaaaataaagaaaaaaaatatgggaatacataatgacttggaagacaaatctaaaaattccatttactagttactagaaatccaagaatgaatgaactaaaatccaagaatgaatgaactaatattaacaattaaattaatgagttctcacagttgaagaagtttctttatgttgaaagagaatgcaaagtgctaagaacaatgattccaaaacaatctaaacgcaaacatgtgctcagaaagtctggaacatttagtgatctggatggatgacaaagtgtagaaaatgatagcctaacacaattaacatagctgaatgcagcttagtgtcatggatgtattctttggagggttctgtgctcagaagtcagactctactacggacaggagtgaaaggtagtaacactcatccctctacactcaagttacagtgggtttggtccgtatctccaccacatctgacactcaattctaggcaaaaccttaatagtttccataaagtataagtggattagatcatatttaagataaaataatctaaatttgggtgacaaaaacagcgtgttgttcctctataattgaatgatatttggtctggagtctgactcatgttctgctacagcagattataaaggtagtatttctcaaaatttatatgtatcttaatcacctagagaaattaaaacagatttctgtattttgtccaagtcagtaagtctaaaatacagccccacaagcaacaagctccaaagtgatgataatgatggcagtttgtgaattaccctttgaagaaaatgatcctggaagacaatagggaaattattcaaaatccttagaaaaatgatgttaaaccttcaattatattcataatcaagtgcttttatttccagttatattcttttattcttattttaatatctatgtataactatgtctttcaaaatttcactttctcattatcaaaaaggtatagaaatcaattgacattagattattatttttattacaagtagtcttgtgaaatccttttattaattctattactgtattctctaaatgaatgtatagttttcacagatatctaaggattacttttttttaatctgacgttttcttgaaaagttgacttcatcatttgtttcactatagtaagcaaaacatgacttttaaatgtatgaatttatttttatttatttatttttgagatggagtttcgctctttttgcccaggctggagtggaatggagcaatctcggctcactgcaaactctgcctccgaggttcaagcaattttcccgcctcagcctcccaagtaactgacattacaggcatccaccaccacacccggctaattttgtatttttagtggagacgaggtttcaccatgttggtcaggctggtcttgaactcctgaccttagatgatccaccctgcctcagtctcccaaactgctgggattacaggcatgagccacagtgcctggccttaatttattttcaaataaggttagagaggagggatggaatgaggtgggagcaggggatgaaattcttagaagagacgattgcttacaagagacaataaatagccaacacactttaacctattattgcaattaagccttttattgtatatttccaaatattctacactgctacatataaataaaaatatttgcaaaaccactagttatgtatcaaaatacacaggtaacttatgatttatcatcatatatttacataatttgcatttatatttactaccataacaggacaaattattgtaaatattaaattttgtgtatatattttatcttaaattattctgatacattttcaagtaaagtgtgggtattaacaaggttatttaaaaatggcttgttcctgctgcatgaagggtttgtctgtcacacacagcatgtgtcttttcattatgtggcattcatttatatttcgggtttcaatcatcactatgttacatgaaaacaaatgttgaacaaatcctttctggtgactcaaagaaaagattaacattataattttatggaatctcttgaaatctgttgacattactgattaaatggtaattaaagttaggaatagtttgcaaatttgtatcaattataatattatctatattttttcctatcttttcttatgttttttctcattctgtctctccttttactcatccttttttttcctgctaatctgccacattaattattcctatcttgggttttataaaatctaaatattgacaccctatatggaaaaatcttgaataactgtaacccaaatcctaactcaaaatgtgaatttatttaaatatattgatggtgaccctcataatttcacaaataagcgttcctatatgtgtgaatagctagaagtattacttctaaattgctaacaataaaagtctgcctcaaagaataattacactaattatcatacagacttactttttatcattgaagtctcccaaaatattttgaaatctaatagcatttccagaaacttcttttctaaaataatgtactcaatacaactattcttacaaccttgaaatcccattaatgatattttatttgatttaaattttagtaataaaatttaattctgcatgtaccctgcaccctaataggcgttttacactgaaaatcttgtatttataaggagtgctagagtttaaggatctgtttaacaagaacatatttaatgttcacacttaaaattttatagattacattatatcctctcaacatttatctttccagacttaaatgatctcacttttggtatatcttacgtgaaaatctgtgttttttctcactttttactggatttgcctcacatacgtcgtacctccctccctataataaaatacatcatttaccattttagaaatgcagtcttcttttcaacagtgtatacgtaagagctcacattacatggccattttatgagcctatgaatttggattttttttgctctttgcatgataaccctagaacagcaggttggtgttatagactattttggagttctgtgctgtaatttgagcaggacttaattaccttgtttcacatggaacctctataataaacccatcagactgtagtaactgagacttactgaagaattcttttggccttctatagattattgaggtcaaagttgcccacggctcacatttatttaggattttattgagaagactaatttccttctatagagaaagaaattaaataatatatggtcatatgagagaaagaaaaatgtttctaaatttgtcattgactatttctacttactactcagcacagaccttataatctatcactgaaatgcgtcacaaatagttcacaaaactccatggattcttctgtgcttaatcgatgcgtcacctttaggctttagttaaaatgatattttatttctgaaaatctttataacaatatacctggtcattcttataaagaaaaaaaggcattttattcacaattttgataaaatttattatttttctttttagaaaacaagaggacaaaaattaaaagtagggactaacgtggctatggaatttatacacaatttcatgaaccccatcatagggctctttttaaaggagatttaaatctagatgtgggtcgagacttcaaacatttagcaaggcagacaagcgtgaattgttttgattcttctgcgaaacattgcagaaactggtgtgatctgttccccagtgtgttcccacaaagtcaccaatattcagaggctctgattccattagacaacaagcaatgctcacagaaatagaacttatgccttgtctgactgctcaagcacatggccgcaaaccttactgaagtcagccttgtcttgtgattgggtttctaacttcattccaagctctcacagagagtagaatattaaagatgaaagattaaagttgcacggtagaattcttttcaatataataaacattaaaaagtggtaatttacaaatgaaaaagcttccatgtctattggaagcatagtttacaattcaagcacatacagattgagcacatctaatgtgaaaacctgaaatccaaaactctccaaaatccaaaatactgagtgtcaacatgatgccacaagtgggaagttccacaaataaatatttaatacaaatttgcttcatgcacaaaattattaaaatgttgtgtaaaattagctttgtgctatgtgaataaagtgtatatgaaaaataacttaatttcatgtttaaccttgggtcctatccctaaaattacttatgtatatgcaaatattccaaaattcaaaaaaatccaaaacacttctggtctaaagcattttgcataagcaatactcaacacgtacatctgttttatgtagaaagatgatgaatatctgcctatcttcattcaaacctctcatttccaatccaatgttcatttatttattcaaattcaaagtatatacatatgcaggcttttttttacctcataatgatgtatacatatcagagcatatataactcattgattaatatagcatactttaattaataagacaaagcctaatttacttgatatattagattatatgcaatatgcgttagtgtgtgtgtgtgtgtgtgtgtgtgtgtgtgtgtgcagtttttgtgtgtgtgtgaaatagagaaatgagagacaaaggaaaatacaaagaggcaacccaaagaaatcaaagaaacagaaaaacaaaaagatgattgaaaagattaaggactgcatttgggatattaataagacttttattgtaactagtgtcattgtaaatatttttctgttatcaatttaattttcatggaataacaacaacaacaaaaccctaaaataaggtttttattttaggccttcctgccttcttccttcctttgctgcttgcctgccttcttccttttgtgattttttaagtttctttaaaaattccattaggtaggcctattcacaactacttacttttgacctgctttaatacattaaaatacaactttatataatttatgaaaatatattcttacatatttcatacaagacttattcttactatcaagttattttaggttgacaatatatcactttaactaagtagagtctaccttcaaatatcattgtaccactttgcgtgcagcttaaggagattacaacagtgcattatcaaccgcttcactctcttatttgtattattttgccacactttttatataaactataaatacgtgatgcattgttactagctttaccttagctagtcagttttcttaagagcaatagaaaataagaaagcgtaattttctcttaatttgttcattttctgaggctctttctttgtgtagagtctagtttctatttagtattatttttcttcttcaggaagttcctttaatattccttgtagagtacatctgctggctgtttggttcctcattttttgcttgtttgaagaaatggtttttctctttcatttttgaaatatctttttattatctatagagatgagttgatagctttcgttgttattttgctttgcctttcagcaccttaaagaactatttccattatcttttaactggcatgattcttgacaagaagtgttttgtaattttatctttgttccttcgtatatatcctttcttctatcttcaaggtatcttttgttatttttttccattagtttgaataagatatgcctagatgctgttttgttattgtttgttttattgtcatttgtgttttaatctttttcctatttagtgtttctaagtatctcggatatgtgattggctctcattttactttgaaaatgcctagaccatcatttatttaaatatattacttcttccttgttctcttttctctttctgaaattccaattacacatatattaggtcaatcgatacagcctgacagtactcagatgctttttattttcttcttttttctcacattcagttttattgctttctatggattcatcttcaagttcatgattattttctcagctgtgagaggtccgtgaatggcatgcttcactgttttcactgtttttatttcctagcatttccaattctttctgatagtttctttactacctccctgatgaaactgcccatgtaattttatgtttccactagagttttgacataatcaatcacagttattttgcttatacagtgttggtgagaatgtaaattagctaaaccactgtggaaagcagttcagaggtttcccaaagaacttagaactaccattggacccagctatctcgttactgagtatatacccaaaataaaataaatcattctgccaaaacacacatgtgctcggatgttcatcacagcactattcacaatagcaaagatatagaatcatcctacgtacccaacaatggcggactgtataaagaaaatgtggtacatatagcccgcaggatactatacagccaaaaagcatgatcatgtccttcgtggcaatatggacactgctggaggtcattatcctaagatcaacacatgaacagaaaaccaaatatcacatgttttcacttgtacgtggaagttaaacattgggtagaaatagacaaaaagatggccacaatagacagtgggggctactagaggcaggaggaagggaggaaggcaggggtttaaaaactaactattggatactatgctcactatctgggtgatgagatcaatcacatcccaaacctcagcatcgtgcaatatacacatatagcaaacctgtacacgtaccacccgaatctaaaaataagatgaaattactttaaaaagtttaaaaatagccaggcacggtggcccatgcatgtaattctaattactcaggaggctgaaatgggaggatcacttgaacccaggagattgaggctgcgctaagctaggatcatgcaactccaccccagcctgggtgacagacagacccgcctgtctctaataaataaataaataaaatcccagttatttcaaatttattgtcaaatagttactagatgtgtgtcatttctgagtctgtttctggtgattgctttgcttcttggcaactttttaaaaaatatttccttgtgtttttgtatgtgtcgtaatttttgtttgaaagtcagatatggtgtgcaagacagtagaaaatgagaaaaagaaaggcagtaagcacatttttttaaattttaagcctttattgtgagaattagtacgggttaaaccattgggatttagactagattttgtttgtctgtctgtttgttttgctctggttatcctcagagcaacatagactacaaattctcctatttcagtgtttcctagccttggtgccatttacattttgtattagataatccacatttttatggggagatttcctgtatgttttaagatgtttaacagcatttctggtttctatatgttagatgcaagtcataagaaaaaaaatcatttggagatactgtcaaatgtctcctgggagaggaaaaggtgacctgctggtaagaaccattgctcttgctgtaaccttatatttagatgaaaggtggttttccagagggtgtttgtaaatgtttgcaccacactcagctcagattgttccttttatgctgtgccacagaatgggtatcatttcatacacttatctctctcctgcccatctcccttaggtattttgctattactttttacttgatgctggttagtccgctggtgaggggagcagttgacagatgtttctttgctgctcagattaaacttcaatgttaggctggctcgtgccctgagtgttgagggcatggcttcctcagtgctcctgcgcctccattgttctgagccaagcacatatttctgccctttcctgtgggtatgtgctttttcctcctccagttctcttttgccaagttcagtggcttttcaccaaggtcataatttaaacattatttgttgtcctttattcacaaatgaacagcagcaacaaaaactgtaagttggaatagaatccctcaataccagcatcctacaggagttacacacttcctgccagtccacattttcctccacctgttcattaaaacatcctcattgaattattttaactgcctatagttgtgtgtcctctgtgtaccgcatgcaagccagtgcttatgtctcacgtctctccacaagtacatcttcccctattattgagtcattatttattcttattttttttgccttgcaagctcacttggtctaataggatcaagaaaagtcataaatctgcagtcggccaggatgctttttattgtatggataggaggaatactcttacctgctgtttacacccttagaagaaacttgaagtgtgtccaatgactaacaaagaatcatgattggaaggtggtagtggctcattcctgtaattccagtactttgggaggcagagacaggaggattgcttgagcccaggagttccagaccagcttagggccacataacgatacgccatctccacataaaagaaaaccaaaaaagttttctgtgttgttatttaatgaaagtcagttgaataatgatggttttaccagcaggattttgagaccaagtttaaaaattaactgtgtaatcttgggtatttgactttacccaaacaaattcaaatatatttgaatttgctcatctgcaaaatgaggaaaaatatcatgggtgcctgtaaaaagtttagaaacttcagaaaggtttttaacccatagtaagtccccaataaatatagattaatattgtcagtcattattatctaggctgaccacatgatatcagacatgtaaccttacttaggctcttctagttacacatattgcttatgagttttttcagaaatcaattcatgtacacatataacactgtcagtaaaatttccacagacctaggtaatcttatttaaaaattaagtcatcagcttttttattcacttttttcttttctttatgccaagtacataccctcttctctcctccaaactattctagagaaaaaaataaagtgataaagtggattcttgtacaaaaagacttaccttaaactgtgtctttttactcttttaatatttaaatgttactaaaaatctttgaaagtatatgaaaacatttttgaaaagctctttttgcataataaatattagtcatcaacatgctaagtatttttttcttgacaaaaattatttaagagcagaataatttttgtatagatttggaactcatcttgctaatgaagatttttataatttatgtcatttggctcatattaaacaatcttttggtacttagtaaaagttaagaattagaagtggattcatttattttaaatttatgtggtcactagcagctactgtgtacatactgcaaaatgcatgtaacttgattgcataaaatgaatttatgaaaaattgttggttcccaaggatttctttaatgtgttacattaaatgcaaaaagttataacatgattgctttttattttttgcattttttttacattggtgtgcattattattattatttatttatttatttatttatttatttttttagacggagtctcactctgtcgcccaggctggagtgcaatagtgcggtcttggctcactgcaacctctgccccccggattcaagcgattgtcctttcctgcctcagcctccccagtaactgggattacaggcgcccgccaccatgactggctaatttttgtatttttagtagagacggggtttcaccatgttggccaggctggtctcgaactgctggcctcatgatctgcccgcctaggccttccagagtgctggaattacaggcgtgagccaccacacctggccacttgttttattgcatagttatctagatggtgaattaaggaaaaatgatacattaaaatcatagtataatctccaaacctttgatggtatttacctacaagtaaaatcaagagtaacccaaacactaaaatgaaaacttggcactgtatttttgttactatttccaatattgctcgtagtttgaaataaaaactttattataatttatacatttagtctgtgaccttcaattaattataattttcaactagtgttacctagttccacaaagctgcatttatgaagttttcagaataaacacaatttattttgcatgtaaatataaagttgtaaatgcagattagtaacatttttaagatatattatgaaacaggtacaatttagacaattcaaggtggaggaattatttaaaatttaaaacgagaaacagatggtacttagttatatttgatagatcctttaaatttcatcagtatatatatatatatatatatatatatatatatatatatatatatatatatatatatatatatatatatatatatatatacacaaacaaaaagagcaagatgctacatagctacatcatatcagtttttaaaaactcagttttctattacaaatttaacagctaaattgggtattaaacacactgtcagagtcagacataactttctctggttttaatataatgtattagccacgatttataggccattaaaagcattttgaagttgctgaaaacaatatactgtttccaccatgtattttattagagctacaagataataggtttcttatgacaataatagtcataataaaatacaatgaaaaaagtttatggctttcattgaaaaaaaagtagatttaaataagaacagtatctttatatccatagttcaataatttttctgaaacctactgcacagacctgtaaatgttattattttattttattttatttttggagatggagtctcactctgttgcccaggctggagtgtagtggtgcaatggtgcaatctcagctcactgcagcctacacctcctgggttgaagtgattcttctgcctcagcctcctgagcagctgggactacaggcgcaagccaccatacccagctatattttttaattttttaatttttatttttagtagagacagggtttcaccatgttggccaggctagtctcgaactcctgacctcagatgatcagctcacctcggcctcccaaagtgctggcattacaggtgtgagccaccatgcccggcgtgaatattatcttatataaaataatacactggattttcctatgtgcattttgatgtttttgttctagtaaataaaggaaaaccatccactacatcatcataaagaagaattctttcagttttgcttgagtgcaggtggtatagccttctgctgacttttaatcatccataaaaatatttataaataaaatatgtttttccaagcttcgggccattgaagtcattatattcataaataaaacaagagcttatgcatagttatccagtacagaagacaagaaatgactttccatcctaatattaattagcaaatatttgtttaaattacaattaataaattataaacctatcatatttacaaatattttgaacatattaattatttattttattgtgagcagtagtaccttaatcctgaattgctctaagttcattcttgtgactatttatataaactttttcaaaattcccataatttatctttctaattaaaatatagtttactctaaagtagtcctatctgaaaaatacattattataatgttaatattatgtaatattatttgcaaaaaatacataagttatatatattcatgaggttcctagatactgaatttaaaagaatgattaaagggcattccacaaatatcttctttaatttgtgattgtgaatttccatttgaaacaacaaattagaaaaataaattaagcatcataaatatcatgtcggagaaattgttctctgtaataataattacatgtattataaaaatcataactgtaataaacagtataatgaaaggaaagactatttctctaattttcaaaaatgaaatattgaactaatgaatagattcttaagataagtcttgttattactggagagatcttataatttttttcaaattattcattacctaaggaaatcatgttttttcttagtctacctatagtttttgatgaaatgattaataatcaaaggtgcttatttctcactgaagcgagcaactcagtgttgttctagagtgttgtgggaaaagtgattttcttttgttgtatttctcgatagaaaaattttgctatgatatttctactgtagcttatttaatttttttccaatgttgtgaagctatggctcaggccaatgggtgaagaaagatatataggactataatcgttttgacaactccatatgactgtgagccttttgataaggctagtcatcatctgaccacttagaattgaataaaattttgaggaacaaggtttttagtacaatgatgtattactttcttcatatatccacagtatttttacctaacagattcatggaagaatgatgatgtatgccagaacaccagatttgatcaatctttgagattaggtaataataagacccttaacctaactttactcaattattttgctgtttccttttagaattagtttgataaaaattgtggaatatttttatctctattaaaataaactaataacatatcttaatccatttgtgctactacaacaaaataccagagattgggtaatttagaaaaaacataagtttattttctcagtctggaggctgggaagttcaagatctaagtgctgttaacttgtgtctggtgagggccttcttgctgcctccttccatggtggaaggcaaaaaggcgagtagatgaactcccttcatcaagctctttcataagggtacccaatcccattcatgaagggattgggcctaatcatggtaattagctgatcatgacctaattgctacttaaagtctccacctcttatactgtcacattggcaacacttgaattttggagggaacacattcagaccatatccagcagataaaaaagtgaaaataaaacacagacagaacatataacaaagctcccatcccacatgaattagtaccgtgagaatttatcttatataattaacatagcacttacctagaatatatgaatcctcgaacttatgtgttaattcttgatctcaatgctaaggcttgaatcttcaattcatgtgactgtttgattaatcctcatgaatacttgaccgtttttacaaaatcaatattttgactttttgtatcacgtgtgttctattcctttctgaaatttcttaacacagctgacaaacacaggtacaaagatttatagcttgggttctgaactgagctactttgatatgaatctaaaaagacatgccatattaaaatatgcctttagtctacagccaattaaagaaattagtgttaaaagaagaaatctgggtgattctgagatttagtttataatctgggaggagtgcaaatattattaatattataaattagtagtatgaaccataataataaaaataataaagcttctcatgtaaactccccaaatataataattgttttataggtatctgactcagggcagaaaatagatcagctttataatattgactgtctaatgactacaacttcctttgttttaataaaaaattaagatggccaaataacaatgaaattgtgacattcaaatatacttttcaattataagcactgaggcaccccaaactctgtgggcacaactttttttgttttactccaactttaacaatatttttttttaatcactcaaataaagaattaaattaaccaagtcaagatggattaaagacttaaacataagacctaaaaccataaaaaccctagaagaaaacctaggcaataccattcagaacataggcatgagcaaagacttcatgactaaaacaacaaaagcaatggcaacaaaagccaacattgacaaatgggatctaatcaaactaaaaagcttctgcatatcaaaagaaactattatcagagtgaacaggcaacctacagagtgggagaacatttttgcaatctatccatctgacaaaggtataatatccaggatcttaaacaaatttacctgaaaaaaacatacaaccctatgaaaaagtgggcggaagatatgaatagacacttctcaaaagaagacatttatgtggccaaaaaacatgaaaaaaagctcatcatcactggtcattagagaaatgcaaatcaaaaccacaatgagacagcatgtcacgccagttagaatggtgatcattaaaaactcaggaaacaaaagatgctggcaaggcagtggagaaataggaaagcttttacactgttggtgggagtgtaaaatagttcaaccattgtggaagacagtgtggagattcctcaaggatctagaaccagaaataccatttgacccagcaatccgattactgggtatatacccaaaggattataaatcattctactataaagacacatgcacatgtatgtttattgtggcactgctcacaatagcaaagacaaggaaccaacccaaaagctcatcagtgatagactggataaagaaaatgtggcacatatacaccaaggaatactatgaagccataaaaaggatgagttcatgtcctttgcagggacatggatgaatctggaaaccatgattctcagcaaactaacacaggaacagaaaaccaacacagcatattctcactcataagtgggagttgaacaatgagaacacatggacgcagggaagggaacatcacacactggggcctgtcagggggtggagggctaggggagggatagcattaggagaaatacctaatgtagacaacggattggtgggtgcagcaaaccaacatggcacgggtgtacctacaaaacaaacctgcacatcctgcacgtgtatcctagaacttaaagtattataataataataataagcagggtttaatttgaactggttaatgcatgtgttttaattacttgtgttcctccaatcaaatgtttgctgctttaaaatttttcatattttaattacctggtcaatgatgaatacaatatctgaatatatttttgtctgtttttactttaacatcaataacgtcataacttaaatttgttgtttcatacttagtaatatataagccaaaattcgggagttaggctttaaaactaaagctttaatattaatgttgtacggtaagaaaaagagccgatgctaggtatttctatgttttatctggactgtgatataaattagctttaccattttaagtgattttcatgttgtattcagggaagcaatgccattaaatgatcagaatagattaaaacactttcatgttttcaaagtataaacctagtaaagagcatcttctgtttttctatatactcataattgtataaagccaccagtttaagctattaaaagtatccatgccattctacaaaacaagacaaatacatttatcttgaacatgctaaatattgtctgcacacaatttctacactcaaacattttagataaaatatgttactatttcctatttatcaatgaataagaacatattggtttgagctatcagcaacaagtatattaaacatgtattaacttccaaaagaaataagaatatgatgtagtggagatattaaattatatttccaaagaactatatgacaatttgttgtcttataagacttcaattactttggatggggttatatatccctctagacatttttttttgatagaatgaacatatggttcttaattcagctaaacaaacacacataaaagaaattttaaaatatatgttttgtttcattttatctcaatggccataactttcttattctttggaagaatcagctaaattaagcatgggctatttgaatgattttcttgcaacaagagctaaaagactgaactgtctttctgaagccattgagaagacactatttcttagaattttaaagtctctggttcaattagtgaaatagtaggaaagttcagctctagggtgaagaagatgtttcaaaacctgctaggggaaagttacaagtctgcattcacatgctctaagtttttgtcagaaatgggatttggggggttatttgactgtccttatcaggttaaatattactgagacctgatgttagaattactgttataataaatgagaaaatataaaataaagccagagagagggagagaaagagagagagagagaatgaataaggccaaaggaatgtgttgcttttcccacctctcaaacagtttagccttctgaaacctacatttcctggtattacaaagtgaattatacagtgtgtaagaaaaaattccttccctgaagcattatggcaaacctgaaacaatttcaggtctgacatctcccgcagctgaatctgatgagaaacagatcaaagtcaaggtgaatgtttttccttatttcccccctgagagtggaagctggattgtgtaacaattggtacaaaaacctgctaccagcaacagtagaagcggtaattcaaaacaatccaagtttataaagaaaagcattaacaatgttgcctttttaattttagtcttaccactgtgcaattttgctttccaacaaagaaattagatgacactagagaattacatgacatatgtattcaattttgggtaacttccattttacataagttgtttttaatataaaaattatgttttaatggatggatatagatttccctggagaaaatcttatgacttcgtaggaataggagagtgaaatcaagaaagtaataattatcaggtatgataaggttttaaaaggagttcctacacataaactctttgtaaatggcaaattaaagattcttaaattttcactagcattagcccaaactgaaggagcttagaatacagatttctagccctataactctgagattctagttgattagttcttgctggaaatctgaattttaacatcacctgagaggtgatttctgatgcagttgttgcatggactctacttgaaggaacactatgataaatgccaattgcatgaaaagcagacaaggagacaaaaacaaagttatgccatgtgaagggcagtgtctgtattcctagctactaccatgctactgatctaaaatgattcccctatgttgctcttcctttatcagtatttctcatccaactcattctctctaaggaaaagcacctgcgaaatgtgattcttcataatagaagaagccaacttactctgtaagattcatatcacaaatacataattttaaccaagttttcttttatttttgttcaactttatggagaactaatcattaaagaaattttgaaggctgtaattcaaatgtgcatcttttagatactctaacccatcataatctttcggttttctaaatattttctaacttcctagaaaataagtttccaaaaaaatttactttctaaaaattagtacttgaaaatttcattttagtgctaaattaatgagttactcagctccattgctggtgtggctttgctactacaatcctgacaaaaatgtaaatgaaggttctgtccccaagtacatgttggagccaagaaatgtcttgtcctcaaactgctcttggttattttggtctcagtgtgtaactatatacgtttctacttgtgggcacactgacctgaatttgaagttgttgtttttccctactttctccaagataagtaaccatataaaagtccttaggtatcattcagttagtatttccaaatataactcccctcacccaatattatatttcttttacctggcaagtttgaaataatattatttgctagcacactaacttaagatgttcaaggtatatacatttgtagcaggtcaacccaccaatgcctatttgcatttactaaaagataaaaataaaattgaaaataaatctttaactatgtacattcaaatattgatatcaggtttataaattaaaatatttggcaatttatatctcccatgacctttgtattagtccatttcacactgttataatcaactgcctgagaccgggtaatttacaaagaaaagaaagatgtttaattaactcacagttccacagggctcagaaaacttacaataatggcagaaggcaaaggaaaagcaaacaccttcttcacaaggtggcaggggagagagagagtgagggacaagctgccaaacacttttaaaccatcagatctcgtgaacgattattatcatgagaagagcatggtagaaaccaccccacgatccaaacacctcccacgaggactctccctcaacacatggggattacaattcaaaatgagatttgggtggagacacagagccaaaccatattatttcaccccagcccctcccaaatctcatgtcctcaaatttcaacaccaatcatgccttcccaaaagtcccccaaaatcttaactcatttcagaattagctcaaaacttcaagtccaacatttcctctgagacaaagcaagtcctttcttcctaggaaaaaaataaaaataaaaataaaaaaagttagttacttccaagatatgatagaagtacaggcattgggttaattttcctattctaaatgggagaaattggccaaaacaaaggggccacaggtctcatacaagtccaaaacctagctgggcagtcattaaatcttaaagctccaagctctcctttgacaccatgtctcagatccagggcacactgctgcaaggggtgggctcccaaggacttacatagctttacccttgtgagtctgcagggtccatcccttacagctgtttcacaggctgctgttgagtccatgaagcttttgcaagcacatagtgcaagctatgtgtagatttgccattctggggtctggaggacagtggccttcttctcacagctccactaggcagtgccccagtagggacactgtgcaggacttcaactccacattttcgctctgcattgccctagtagagttctgcatgagggctccgaccctgcacaaacttcttcctggacatctaggcattgccatacaaattcggaaatctaggcagaggctcccaaagctcaatttttgtcttctgtgtacccacaggtctaacactacatgaaagccaccaagaatggggcttgtaccctctgaagcaatggctcaagctgtaccttggccccttttagccacagctggagttgacacagctgggacacaaggcaccatgtcctgaagctgcacagaacagcagggccctggagctagtgcaaaaaccatttttctctcctagacttctggacttgtgatgggagaggctgctatgaaggtatctgagatgccctggagacatttttcccattgtcatggctattaacatttggctccttattacaaatgcaaatttttgcagctggcttgattttctccccagaaaatgtttgtttttgttttattaccacaaggtcaggctgcaaattttctaaacttttgtgctctgcttcccttttaaataaaagttccagtttcagataatctctttataaatgcatatgactagatgttttcagaatcagccaggtcacctcttaaatgctttgctgcttagaaatttcttctgccagataccttaaatcatctctctcaagttcaaatttccacagatctctcaagcagcagcaaaatactgccattcttttgtctacagcatagcatgagtgacctttactccagttctaaacaagttcctcatctccatctgagaccacctccgtctggactttattgtccatatcactatcagcattttggtcaaaaccattcaacaagtctctaggaagttccaaacttttccacatcttcccatcttcttctgagcccttcaaactgtttcaacctctgcccattatccatttgcaaagtttcttccacattttcaggcagttccccacacctggtaccgattttctgcattagtccattttcacactgctatgaagaactgcatgagactgagtaatttacaaagaaagaacaaaggtttaattgactcacagttctgcatggctcaggaaacttacaatcaagacagaaactgaaggagaagcaagcaacttcttaacaaggtggcaggacaaatacatagagagagagcacaaagtgggaaatagccaaacacttgtaaaccatcagatcctgtgacagctcactcactatcatgaggacagcatgagaaaaactgccctcatgatccactcacctcccaccaggtccttccctcaacatgtgaagattacaattctagatgagatttgggtagggacacagagccaaaccatatcaatcttcaaataatatcatagatttattatccaattgtatacttagaaataaccttgacattgtctacaatatataatctgttacagtaagtaattttgaattaaaatagtagaatgcattctgatacaggaaatagaaacctaagaatgaattattttaccattgccaaattatacacaacatataagtagtagaaattgtagatgatttaaagtgtgttgtttgtactttaaagtgtgtagatgatttaaagttgtgtgtgttttcttctgataaagtggatctttacatgataaattagtaacttattataaaaagttagatcttacatgataaaaataaaacatcatgtatgttttaggttaagtatttcttttgtctgagttagatttttgcagtaaagttgctgtgatgaagcctgatgcaattgtaatactaaagtctaaaaaaattagatttatggtaagattttgtaaagttattcatagccatttaatagtgtaagacatttttaagcatcttctaaaggatgacaaacattccaaaggatgaccatttagttctatttttgcatattttaaagaaatattagacacatctttacacttgatattgtattggaagggaattagatacaatgaaacatataacctaaaagaatctcattaatctaggaaaaaataatggaaaaaatctaggaaaaaataatctaggaaaaacaatggtatgtttaggaaaatagcctgttgcatggtatgttatatatcaagaaggtatgtttaggaaaatagcctgttgcatggcaagagagatgccaccttgaagtaaaactgccatgaggacaaatgtttggctctcatgtacaaagatgttctgcaataggccttgaaacaatgcctctaacatagataatttatcataaatgtggttgtgtaacctccccagtggtcatgagtcttggcaagaaagtctgaagacatggcgagctgcacctgttttaccctgaaagtttcctttataaaaaatatgttttggagtgtagatatgggaatccactctcttgtggccactcaagacattacttctgtttttaagtcccctttaatttttttctttccctgaaaaactggattcatcagcctcttctgtggcctctcttgtccttcaggctttggggatgggtttgcatttatttgctcaccattaaacagtatgcatgtgtgttcttcgtaactatttacctatttgtgtgtgtgtacttcttttttaagaaaataagtttatatttctggaaactaacgatgttattcactttataaattgtaaaaaaaaacagattttttaaatgacatgtttattttctgaattatttgtattgatctttattatgtacgagaactcagagaaatggtttttaatatattgttagaatacattaaattaaatttaacagagttcatttgagcaaaaagtgaatcatgaataaagcagtactcaaaagaggttcagagagctaaattcagcaaattggcagcgggtttttatagacagaaccaggtaataaagcagagaaatagcttgattggttacacctaggcaattttcttatttggacctggtccaaataagattgctgatgattggctgggaccagaaatctgttacaaaatatacaaaattaggttttagtttgtttacatactgggtgatgttccagattgttatgtggaaacccaaagtacggaggcagcctcacacttaggtcttcctggtttgtttgtttgtttgtttgtttttgtttttgtttttttgttttgttttgttttgagatggagtcttgctctctcccaggctggagtgcagtggcacgatcttggctcactgcaagctccgcctcccatgttcactccattctcctgcctcaacctcccgagtagctgggactacaggtgcccgccaccacgcctggctaattttttgtatttttagtagagacagggtttcaccgtgttagccaggatggtcttgatctcctgacctcgtgatacacccacctaagcctctcaaattgctgggattacgggcgtgagccaccgcacccggcctgtttgtttaacctaacagtaccttaaattacatgttgtttccttacatatattaattagcaatttcaaaaacaattgaagttatgacagactttatcttaatgtttttggtaagatgagatattgattttataaaaatttcctttttaattggcttggcatattttaaataaatcatattatagcataagataatcaattgatgatgtgattaatatacaagcagttttaactttattcagaagtaaaaataactgtaatatgttttcttaattaatgtaggtcaaattaaatatttttgaatattatattgttaagagaacttttacggtcttgagaaagaaagtagaaaaatacaatgtaaaggataagatgtaatacaagagaattggaattatattaactcaatttgaatgtcactaagagtttacaaatcactttcaaaatgagctgttcattttgctaaatgttatatatcaagaaaaaaagactagaatgacaaggcaactaagaaattaaataaaatctttgaaataaatattttcttaactttttatctaatataatttcacagtcaggctacagacctataaatgtagcccctaatttaaaataacctatagttttaacaatatatacatatgtaataaactttgaaaaaccatagattttatatattatatataaatgtatatatatttaatggaatgaaattatgcttgatttaattggcctaaataattacatattttgtatactgatgttttgaaattaagtcaatatattcagatcaaataaatattccaaagcctctaagtaggcacagattttcatctaatgccaatgaaagtgtaaactatttaatcatattttctgttactcatttaatttttagtcagtgatttacaatgtttttttaacaatattcacaataaaacaaaatgtcagtagtcttcattataaagactttgctacatgcttacttggctaagataaactatacttctcataatttccttttatttgcatatttccatacatgtgggctacaagattttcctggagaggcagaggcacaagagacactacaaccattttgtacaactcaattgttgctgatctgctgagtcaactcattcaaataaagcagcagctgtacctttattttctttcttactcctggatttccttcagtttctgtgactcatgggacatatgtgtgacttcaattccatctgaaagagcataggattctgcaggataccttagtcaccaagatcagagggagatcttaattgcatatgacaaacttattgtaagaatgaatggtgattatgtgttctgacaaaaacacaatcgtttattaagcatttagtacatgccaatctgctagacattttacttgtaaataagtaaatattcaaaaatgaaaataccccaaattaagatacatatatttaagagatataaataattgagagattcatttgctctccaaatttgcaaataactaccaatcctcaatggcttcatcttcataataaaagatgttaaaatatatataagattatttacaaccttaaatttgggagagttaatgaaaaggtaatatgaattaccatttctatcttatttttaataactttataacagatattcaacaaatgtcctatattgacctaaatttagattcctgtgtttagcaaagagtgctaaattaaacattcatttaaagcaaagcttcctcacattttagccctagatttttctatttttcatttgaatatatttgcaataaagtgatatactttaaatacgcatatatgaaatatgcacatataatataaaacttttgttttttagcataagtgtttgcaatgatggaagtttatatatatacacatatatacttgtacatatatatgtacatacatacatgcatatatgtttagttatttaaatgattataaaatattatattatcgcagaaaaacacataaagcctgtttcttctacatctcagtgctaagagatattaccactaattttaaattttgtcaatcataaagatttaaacttttaatcttaaatttttccactgcagaataactgttattgttttttatacctataatatttgtaataatagcttgtttacttatgaatagatgttgaactttcagaggtattttctagaaatattacacacatttcaaaatttaatctttccgtaagtgagtcactactgcattcctgaaatatgacttcatgggacataccacattatgtaagatacacttctgtatttcactgccaaatattattctaattattttacaattttttaaactttcaagttcagggatataaatgcaggtttattacacagataaacttgtgtcatgggggcttgttgttatacagagtattaagcctgggacttattacttttcctgatcctctctctcctcccaccctctaccctctgaaggccttagtgtgggttgtttccctctgtgtctatgtgttctcatcgtttagctcccaaatcttatttataattgaaactgcatgtgaattatcttttttagtatgccgtttatcagattttattattgtttcataaaaaatactcaacctccctttttttatgtttaaaacaatatttgtaattactaatgatcatacttgctaaaattgtttggttcaaatgtttgtaataatgggactagttgcaatctagttttaatgagcaaggcaatgttatatccaagacacacccaatggtacctcttaaacttagctcaggagatttctatcaagattcagatggcgataaaataagtatacaaatctgttcacaaacattaataaatatctgaaagttgattgcaaaacaaaatgaaaaccttaatgtaagcacatattttatcaaatggttccatcatttcattgagaataaaagcattgttctttcaaagtttatagaatgttcaaataattcatgtatgctatatgaatttataatattttagacgtatataatatcaggttaaattcaacacatttttattctgtaggggcatgacactaaatttttgcttatagaataatttccagtgatgagtaattattttctgttctaccaaaattctatcaatattttaaacaatcttgcaattagtttattttaaagtttatatagccctcagacatgaattaacatgatgctgatatcagacatgatgctagattattatttatcttttcaatgttttttaccatactaaaagcataatgcattattttaaatttgttatttatgttttgtcagaaaataatgaatgtttctaagttttcagatttgttcacatatatttatagcattctcttaaaattttaatgtgtctgtattgtgcgtataacaatattttttctccctgatttccttagctgaattataagaattttttaaaaacttttaaataaaaaccttctagatttatcaattctactagtttttgctttacattttactaatttctatgccatatttaatactgcagtatttctaatttgttgttttctctttactagcttatgttattaattatcacagtctatctttcaggattacgttatttcaattagagtataagaacttttcaaggtacccttttgtgtttccattaccaaaaattgtgttatttttgtcataattattattttcagtgtgttatgaaaatttctctccattgttgttattttcatttcaacagccaattatgctttaaggagactgagataatgatttagaattgtatacatataggtagtattttctgtgctcttgattcatttatatgaatccatatttctatacagtatcattttctttttgtctgaaggatttcttgtgacatttattgtgtgacaagtcttctggtaatgaattctttcctcttttacatatctaatactgcctttgtttcatgtttgttgaacagttttttgatatagaagtctatactgatagtttatttttccattcagtaacttaaaagttttattccaccaccgtctgtctgacgttatttctcattagaaatctgctgtgatctagttctatgtatatcagtctttttttctgaatttaaaaaatttctctttatcactaccttgcacaatttcatttcaatgtgctttacattcattatttaaaatattttcttgcaattgggtttttttttgaagcatttgaaactttgtagttttcaccaaatttggaatgttttctgttattcttttttttttcctttttcacctctcttttttctttctttaggaactctaattttatttattgtgggccacttgaagttataccactgacattttctttatttgttaaaaattatatttcccatattttattttgaataatttctattgatattttgagggtaattatttttcaactgcaatttctaaactgttgttaattttattttctgtattatagttttcatctctaaaagtttaatttttcatttttaatgttttccaagttgctagatttaggcatttgcaatacagttataacaacagttttaatgtttgtttttattgtctgctaattctaacatttctgtcatttctggataacctttgattgattgatacacctcaccattatggaacagaaaatatttttctgtttctttgcgtttttctgtttttgtttctttgtaattttctctttgtatttttctttgtattgtttctttgtatttttctcccataaaaatgtgttcttttctcccataaaaaagtgttctttgtaggataacactttgcgaatttttccttgtttatgctagaacatttttatttctataaatattcttgaaattggaatatgattaactttcaaacagttttatttttggaggcttttattttaaggtctgttcaatgagtactctctgtgctgaagctaggattaatattcaccactgccgaggtaagattttctatgcttttacccaagacccaatgcctgttgactttttccatctggatggtgatattcttagctctgtgcgcacctgagcactgtcacttgtaattcattgagtttgttcttctctaggccttagatagtttcctcaaatgcataagcaggtcattacacagatgaatactcaaggatactctcctctctggtctctattccagatcaagtcatcttgatcaccatggtttctcagcttcatctcttcaacatagagattcctagtctctgcctatcttccccttccctgtgctacagccaagagtctctcttactgcagtaagctgggtaattaggaggctgattttgtttgtttctcgtctctcagagatcactgacctttactgcctatttttcagtggcttgctacttttttttccactttattggttatttcaagtaggaaaatgaatccagctctgctattccatcctggttacaaatggagacctataattcaatatgtcatttttagttaccttttactaaaattaaatttatttatatgtaggaatctaatctacattattttgttttctgccaaatatctgagcagtatatgttgtctcatcatcacattattgaaacaatgcagaatgctatagtgactgacattggaagaagtgatttctgatcaataaactgccaaaatgaacaccttcttgagcactacatgaaagcaaatattccaaatgtcagcattttatatacatgtgccttttgcttaagtatatacatagatttgttctttgtgcgtccattctgtaatctccgaggtaaaaattgtgacaaattagaattttcaataaaatattttaataaaataggccagacgcagtggctcacgcctgtaatcccagcactttgggaggccaagacgggcggatcacgaggtcaggagatcgagaacatcctggctaacatggtgaaaccccgtctctactaaaaatacaaaaaattagctgggcgtagtggcagacgcctgtagtcccagctactcgggaggctgaggcaggagtatggtgtgaagccgggaggtggagcttgcagtgagccgagatcacgccactgcactgggtgacagagagagactccgtctcaaaaaaaaaaaaaaaattaataaaataaaaatttaagtcccagaatactaacttttttcacatcttaaaatatctcctaactactgtctggttttataaaaataattttattttgcttatgatgttagatgattgaaaagagtcagttgactaaccagaattttcagtaaaactcttgtaattccagtcaattttcagtctctccttatgatcatattaaggaacacattaaagagaatacacttagaaaaacacaccaagctttttgatatctatggtttataatttttaatgttatataatatttagttttatagtctgtattattttattgtttagaaatataatttgttattatttaaattttttgatttatattctaaatgaaagattttattcaggaatgttctttaaacattttccgttaccaaattggactggctataaaatgccatttgttagaattcagttagacggtataaagaaatcagataacagaaataaacacaaattcattttcaactaagcattcctagttcttagtcaacattacacattcaagcaaaatacatttaaaatacattcaagcaaaagtattaaaatgagattcctaggtttttttaaaaaacagagtgttaacttttcttactacagtatcttagcattgacatatactctatggtcaactaattgatgtcgtaccttctgtgtgtgagtgataacagaaatcttaataatatatttacaaaattggccaccatgacttattttaggcaaaagaattagaaaagcacacaaaattgaaatgaacattttcaaagagtcacagacttaatagattattattattttataaattacaagttatgtttataaatgtattacatgttatagcaataacaatacctaggtacttaaaagtatccttctcccctttaattctactctccccattatcaccaatcagagattattactattaaaatattcagtgtgtctacatacaatcttcatacagttggttaaaaatatagagagactaatataaagctcttagatgtcaaaatataaggtaataatatcttctgcataagtttaaaatatctacctcataaagtggttgaaaaaatcaagtgagttaatattttcaaaatcttgtcatagccccaatcgcctttttaaagttttgcatgttatttcacctattgggatacttatgcatttatttctatggagtcagaaaagctgaatcactgcatcacatttatatgttaataggcactgtcccagcacccctgatgtgtctgcctgctaagaaagacagtgggaagtgctttatttgaactgagttctctgatttcaatggagattatggaatcccaaggcagccccaaggtggcgggaggtaagagtaaacattaaattgtcagaagcaagatgaatgtgactactgtaataggaaacagatcacagctgtaatcagaatggttttacccatttatatttttgcattgcctaattaatcatgggaaatctatgaaatcattatcgaaaacaacaaaacagtcctaacaatactaactaaaagttgcttgatttgtatagtgaaaaatttttagtaatggtgcattaccaatagaaagtcacaacccagttcccagagtagaagcttatcatatccctacaaaaatcttttgagtaaagaggaaggtgactacccttgaacaagaaccccacactgtctccccacccccaaattgtaatatgtatcttccttccaatttttcccaaagtagtctttgaccatttactatgtaatagggtaggaaatataacaaatttggtgggaattcactaatagcgaattgacaatcattcctggtgatttaagaatatgggctaatggaattaaagtactcaatggagctttggttcctggtggtaacagtgagtccaaaaacacattgtgtgtttatttcctcacgtctagaatgtatagcttctatagatatgcccaacattagtcagaaattaagcaattagctctgactctgggaattcactagtctttttcttatcaccctaagttgggatgactaataacacagcatcccttatctaacaacaagccttgaagtctcatatctagaaccatctagtgattaatacagtgtgtgattccgttaatgtccaccaagatgtggtctttgttctgaattagtgaccaaatattaatatgttgctgttttcccagggcctgaattcacatgtctgataatcaaaggtaagaaatgtaagcagctaactttctattaaccataatgatctatcagtaaagatctatccatttttttcttcccttcatacagcgcttgctgattttagagaccttagctgaaaataccacatggtccctttgaactgaacaggaaacaagtacaaagaagaaggttactagttgagctaattaattctgaccccaaataagggaaggaagagattttgtagtacatctctttgtacttctgtttactttgatatgattttatagaaaatcaatcacatcaaatgatacagaatgagctatcaatttctcagacatttctagaaagaagttttgggtcacccccaaaggaagccaccataatcaacagaattgcttggtagaaaatgaaatttataaatactggttaaaactatatgacctcataccaaaatgatggccataggagttatagtcatttttttctcactttgatattaatttatattaatgttatatatatatagtatttcctttcctgtttttttccaattctcttactatataagggaatatgaacagctgtcagtaggttatcttgaatttcagtatttaatttataggcacacaagacagaatgtgactccaaataagtatgaacaccttttaaagatggataaagtgttggtcaaatctttaataattcatccaaatttaaaatgggaaaaaaaggcatttgtattattttccaatttccattgtgtcaatactctaatttcagtttgttaatgtgatgtcactgcatgaaaatttggtataagatgcacaatattaactcctatgaatcaatgtaatacagctccaacacaacactgtaaagatgaccaagctaatatcatctcttccacacgttctttttatgatgtgactgatattcctccccctgaggattgggctctttctttttctttttttttctgtgagttcatgacccccaaaaaagtaatcttatgtaatatgctatgctgggtcacaaaagacaattcagctcctttctgacggatcaactgcagcaaccacttttgtgagagaccctaggcagccatatggggaggctacatgtatatattttcactggtagccccagctgagttcccagctcaaccaacagtcatgtgagagaatgaaccttcacaggagtccagcccttagtcatggggttcagtttggcctttgagtgaataggctacaatcactctctctacaactaaaaattgtattttgaaggaacatttacatacacttaaatcatatcaaatccaaacacattatacctaattccaacatttgtacaggaataaattatatattccagaaatgtttgactactatgagatatggagcacccatggagcccatacgtgaccattcttaaaatgtctatattggagtgtggtgaaactctttaaacagctttttacaactgctcctgccctttccagtgttgagtttttcagctccaaataggcaccatttgtgcttttgccccaacaatattcccttatatgaatgaccattagagaaagagttgatatctgtgacaagtatgacttgacagcagggttagtatagtaaaataaaattgagaagtgttgccaataaaaataatgacagaagagtcaaacaaggaattcttacgtaagcagctacctgggtttctcaaatactgggactggatatgatttcagagtgaaaataactggtactgacagaaaatatcccatggatattttgtttttctatttattttttcttgcaaaaaaaaaaaggcattgatagcctcttatagtggactatcttttcaaagatgtatagcaaagtgcctggaaagatagaaataatgtctccctccaaaagaaaaaaaaaatgacgtttgcttactttctattataaagtatttagtttccgtaagttcattggaacccactctgtgtgtagtcataaacgtaggcccattcacattacccttgtggaagctgggacaaagagaattgatataattattctggttctcatgtgcctgacttactgtgaacagcgcagtccttttctccgatccacgagctttgcgtcttctgctatcttctatgaagctgtggcaacttatgttgacttggagatacaaatctcagaaccttcaccattcttgacaattagtggtccaggatgagttgaaaacctggcaaatgtgatacttttacatgctgctattagaatggtctaatactgaagtttttaaaaaaaatccttagaaatttacattgcaggaatttattgaactgtattttaaaatattgagagggcacacttttcagatttctatcttctctgaattttataatctttgaaaatgtctactaaaacctcattaaatgcatgtttatctaagtagtactgaatttaaaattttaaaatataaccctccagactaataattcattgtctaggcaaacacgagtattagctatcattctaatttggttttcatcaatattatttttgtttctttggggttttaattatgtttccaatccattccatcttatttaaaatttactttacatcaatgtttgtataccatttaaaattgcacattttaaaacatctgtttcaattaggctgtctcttattaccatatttgctgcagctgtttctatcattgactgactgatactagaagtttatttggcttaattttccaattttttttttgtattttaggatgaaatgcatttttaaacatttagattagggcaaacattttcccattattttctttgtatctttgttagtttattctttgcttgaaaggaagtaagtagtgttgagacaagtttataaggaaacactaattatgagtggagacatatggaaagggtttttacatgctcagttgaaggcagaggactcggctgtgtcttccagcactggacaatgtcactactgtcaggaatctgaaagcagagtacttcacgcacgaagccgaaaaatggaagctatgttcttcctcattagacaatactcactgccccatgcctcccccacatcttttctaaaagttttattttctatatgcttgtttagaaatacttcagaaagacctagacacagacgttgtcatataagctacagatttttttactttggataattgtgtcactttagacctaaaggagaagcaaatgaatcaatgtgttattcacagacttctaaatattctggtagttcattacattactcacatctttccaaaccataaaaaggattttgggatttttagccctttgttgcttgtatctattgaatatattatgacatgatttatttctttctatctatccatctatctatctatcatctatctacctagtgtcttgttattgaaccattacttaggccacataaaataaaaacatttggaataagtgagacatttagtagttttttcatatttgtaactttctactagaaacatccacaataagaaaatgtgtgtggcacttaaatgatgttgcttaataggctagagaactttaaatcaattttacatctaatatagttaagctcttcacatgaatactaagtgaattcttatgctctccactttgtgaaggaaaaaggctgaaattcagaaaattttacatgatctatattcccaaagtcacatacatactaaatgatggaagccaaacaggaaccttggtctttagacttaaaacatagcttcctttcctttcatgtgcaagtaatgaatatatcacatgtctatttttgtgtaattcactttatgtttctaattgtagcttgatcaatatgtatttttagttggtataagcatacaatgtcatagaacaaataagccccaatcttgaatagcagaatagggtgactatagtagtaacattgtataatttatttccaagtagttagaagagagggcttgaaatgttaccaacacatggtcatggttaccccaaatgacctgacttgatcattacatattctatgcttataacaaataccacgtgtaacccgtaaatatgtaaaatattttgcatcagtaaaaaaactgtatttgtcaataggcaaataatttttactctctagtgttcattcttttattcagatacaaaaaaatttggatcaatgattctctagatttcttccaattttaagctcctagttgatacattattttgtagaaccaaattttcttatgcaaagactcagaatttacagttatattaagtagattattgacacgtactgatatgcatgtgaatattaatatatcattttaaatataacatataccctgtacatgtgtgttatttctaataccattgcagaaaataaattttagtctttctacagcagtctaaattagtcaaattattttttatttgttatataaatgacctcttcactccattttcttttactcaaacaatactaacttcaggaagagtgaaatatttaactataatttaagaaatttccaaatatagtggtaaatatttccttatgtggtcattttaaattgatctaggaagttttaacccttttaataatggatattttatgacctactataaaattgttctgtctagttaccggatagattttgctagagaatattttggatagagcaactgactcttgacggtaaacattttgtttgctattgcctttttctctcatgcttaaaaattgtcagacttttcttggccatgataataatgttgttaataaagtaaaaacctaagtaaagtgttttaatagatgaattataaatgatagggatgagtatataaaagactctctggattcttttgatttggtcaattaacaaaaataaggacatttatgttcgatatgtgcacccttttatctatcttaataggagtctttttagatatgtggcaattctttccatttaggtagtttataattgccataaaaacatttttgaggtttacatttatgaaatataaaataaaaaaatcttcttattcaagtaagaaaggaaataaaggaaattaatcatagtaagatatggaaaagatacttgaaaaattttatatgaatagctacactaattgctggggccattccttgctcacatagctatttatcaaagacagaatgataaatataagctatggtttataacattcttttgaaaatattaaaataaataattcatattgtgcacagatgtctaaatgcaagagtactgcattgtgtattcagagattttttttctttatgaattgggtaggattttactgaactaagtatgcacaatacattttgatgaattattgatatgattaagttttaggagacttttaaactatgaaaatcctgctaaaccatcagaataaatttgagttaaggagttttagtgtaacttttaaatgtgtaattcacaaaactatggaatttacactcatgagcttatcattctatggaaggaaaaacgagtgctagtaaacatccgaacatcttatcttctctttattgtatgaactctgcacttctaaatttgttgattctatcagcatgaagtctattaagccgttttaatctattctatacctgatactgcgagtggcacgcatctaagtgtacttgaaccagaatatttgcatagaaaaaaaaactactgcccttttgcttctggttgatttttatcttattttaaccaacaaaatatcgtagtttgttgctcagatagtctgtaataagatgaacattagcaagactatgtttctagaattgatgataattgttcctagatatgatgaaaaaaacacattgagaaaaataacatcaaatattcagagaagtccccactatttccaaatttgtttttggacaaattacttgcaatattacctctttgcaagtagaggtagataatttccttaatctatgtcatagaaattcttatcttcactctcagtaaatggtatggttacaaatcaagtaataaataggggcaatatttttttatttttcttccatttattagagaaaggaccagaatttttttctgtaaatggtcagagagcaaataatttcagctatctgagccatacagtctctatagaaactactcaactcttaatcttgtagcaccaaggcagtcttaggcaatgcctaaaatgagtgagtgtggctgaattccaataaaactttatttacatgaacaagtgagtggtcatatttgtcccagacagttgtttgctaagctaagtcaaatataaaataaaatcttcaaacacgcctaaagcatgaatacgccagggatatgcaatccctgcagactgctctggatgatgcacttttaagtaaaccattttagtaaaaactacttggagaaatgctggagttgtcacatgtttggacatagtgaacaggaaggcaaaagactcagaataaccaaagcaatcctaagcaaaaataacaaaactggaggaatcagattacctggtgtcagattatactacaaagctatagtaattaaaacagcattgtattggcattaaaacagatacatagaccaatggaacagaatacagaaccaggaaacaagttcacacacctacagtgaactcatttttgaaaatggtgcccagaacatatactggggaaaagacagcctcttaaataaatggtgctggaaaaaccagatatccatatgcagaagaatgcaactagaaccttatttatcaccacttataaaaatcaaatcaaaacagataaagacatatctaagaccttaaactatgaaactatacaagaaaacattgggaaaattctccaggatattcgttcgggcaaaaatctcttaataccccacaagcagaggcaaccaaagcacaaagggatacgtgggatcacatcaagtttaaaagcttctgcacagtaaaggatacaatcaacaaagtaaaaagacaacccacagaatgggagaaaatgttttcaaactacccatctgatgagggatttataaccagaatatataaggagctcaaacaactctatgggaaaaaaactactaatctgatcaaaaaatgggcaaattatttgaataggcatttcaaaggaagacatacaagtggtaaacaggtatatgaaaaggtgctcaacatcagcgatcatcagagaaatgcaaatctaaactagaatgagatacaatctcaccctagttaaaactgcttatattcaaaagtcaggcaataacaaatgttagtgaggtacaagggtacccttgtacactgttggtggggatgtaaattactaacaaccactatggagaatagtttggaggttcctcacaaaactaaaaattgagctaccatataatccagcaataccactgctggatatataccccaaagaaaggaaattggtatgtgaaagagattatctgcattcctatgtttgtttcagcactgtttacaatagctaagatttgaaagcaacctaagtgtctaccaaaagataaatggataaaggaaatgtgataactatacacaatgaagtacaattcagtcattaaaaagaatgagattcagtcatttccaacaacgtggatggtactagagatcattatgttaagtgaaataagccagacacagaaagacaaataacacatgttctcatttatgtgtgagatctaaaaatcaaaacaattgaactcagggacatagaaagtagaagagtggttaccaggggctggcaatgcttttggggctggggatgtggggttgagatggttaattgctgcaaaatcaaatccttagaaagaatgaataagacctactctttggtagcacaaaatgactatagtcaataataactaaattgtacatttaaaaataaagagtgtaattggactgcttgcatgtcaaaggattaatgcttgaggggatggataccccattctccatgatgtgcttatttcacattgcatgcctgtatcaaaacatcccatgtaccctgtaatatatatactttgtagccaaacatttattaaaaaataaataatagaaactaggagtaatattctgtcaacatgcaataattttagtcttctaaatttacaatacaactgtgtctgtgatactaaatgtctcattgatttcattgaactaatgcaaaactcacaaaatcatattatgcaaaataatacaaatgtagcatgaggttataagtttatgtattcatcattattattttacactttaaatgaggcatttaatgctattgtttcaaaatgagagcaaaagtatggttctagttgagaaaatcaaattggataccataaggatgcatttgttgagaagctgtatctttctgtattcagtgccttggatagtactcaccatagaattattaacatatgggttctttttaagaaaaattggaaagagtaagatgaactaggtagctatcagaaataatttgataaatgacaggataacagctacttagtaaagtatttggcaataccctttccacttctgcaatctaaagtcatttttcatttgtcatattgtagtatttggaaaatatcatgacagcatatgatatttggtacattatatgatatttgatatatgaaagtcagctgaaatatatatgtcaaaaatgtaaggacaaaaaaccaaactccgcatgttctcactcataggtgggaattgaacaatgagaacacatggacacaggaaggggaacaccacacaccggggcctgttgtggggtggggcgaggggggagggatagcattaggagatatacctaatgtaaatgacgagttaatgggtgcagcacaccaacatggcacatgtatacatatgtaacaaacctgcacgttgtgcacatgtactctaaaacttcaagtatgataaaaaaattataaagacaaaaaaatgtaaaccttctgtttcaagtaatatagaagatacaggatgacagacaatatcaaaattggagaaacaaaataacaacatattaaatttttgataaaatagaacaaacttttattacatttaacaaagaattagcaaaagagtaaaaatgtcttgggacgcacaaacaaaaataaagcaaaaaccatgggttggaaacaaacaacccacctattctcacactgaggacttctgacagctcctgtgaaactgaagattctgaaatgatagatgcactaaacagaggagacaggaaggaaattcgctggctaatagaaagtttggaatgtaatcttacgagaatcccatatacggcattaactccagatgatcacagtcataattgggggataatttaaataagcctcactatacagtaaagaatagcaaagaaaattacctgaatgcaacactaggtagaggatctcacatacccacagaaatgaacatatgtttgtaatcacttagtagaaaccaacacatagatggttaacatgaataagttcatggcagtaaatataaaaacttataagaaattaatatgttccaaagaacaaatacaacttacaaaaattgtctcaagaagaaacagagtgattgcattgccccaacacagttaatgcaacctaattagaaatttttagaaaaaaccttcacagaaagtaattctggtgcaaaatgctttgcaagtgagttctacagagtattaaagaaacataattctaacaaagaagcttggaaaagagaaaaacctcaaccctcagtctcattttatgtgacatgcataaccctgatacccaaataattgaaatagattaaaataaagaaaaaacgcattaatttcactggaaatagaattataagtatcatgagttaattattgagcaatgcataaaattactgtgagaaactatataatattaataaactgaatggttaatgttagaaaatatagcatgtatggcaaagaaattattattcccataagtctagaaaatgtgataggtcaaaattattattaccacttaaaactcttattaattccaaataataggcaaacttttcatcttataagaagcataaataaaacactaaacaccatgataaatgatgaattgttaaaagaatactctttagtatcaggaaaactttaaggaattaaaggtagtactacttttatttaaaaatcataaacattgaaagttcctataattatacaagggtaaaaaaataaagatacatatttattaaaaaaaaatatacagaagatttaatagactatacaggtaaatttttaaaatttatcaagtcatttataagtttgatattttaaaaatccacattaaattaaaattcacttttataaaacagtaatgatcaataagaaaatgaagttttaaattaataaatttttagattttaacaaatagatcataggaaaaagctaatacaaattgtgcagtttttattgaagaatatttacaaaatgttggaacacattgaaaaatgtctagagacatatgctagcttgtggatatgaatattcaatatcgtggatatgaaattacaattccaaatcaatctacaaatgttttaatggcattgaaataatatattactagaaaaactgattctactgtctatataaagctgtactcttttctcagaacagtggatatttttgtccagtttcatatttgttttgggtgctggcctttgcattattgaaaatttggatatttggcagtatccctcgtctctccccagcagtcaaccttcatggcaaccaatcatgtctccagacattcccaaatgtcccactgtcagcaaaatggccccagttgagaatcattgatgcagagaatgaaagaatggtaatagccaagacttggagaaaaatagtgggaggccttgctctgttcgattacaggttataatgctaagtttcggtgattaaaactttaagtattatctctacagtaataggaggaattcttcattactaatgaagtaagtagttattcctatgagaaacaatgaagtttcattccatacaatatgaaaaaatcaataacacttgtatagagaaatagacgtaaaaggcaaacttatgaaatttttaaaaagcaacataaaataatctaaatttaggcaggaaataatttcttatataaagcaaagaattacaagctatgtgtagataatcaataatgttgacttattcaatacagaatggcctttatttaaaaatgcatcattggagtggaaatataggccacactctatgagaatagtatctataatgaatcaaatctttttattcagaaaatgtaaacagcatatatgaatcactacaaacaactcactttatcaaaagatggttgaaaacatcaatagtatttcacagaagaaagttaaataaaccatagcctatgaaaaaacaaaacaacaaaacaaaacaaaacaaaaagcataacccattgaatattggaaaaaaaacaacaaaaaaacgaacaaacaaaaaatgagtagcccattgaatatcagaaaaaaaatttaaatgtataataaaatttattttacattcagcaaatttataataattgaaatctattaatatcaagcatgtaaatattagaacaactagaagttttcatctcaccaatagtgggagtgtaattcctacattccattgtgttttattgtttttggtaattctagtgaagatgaatatgcacattagcggttattcattggtatcatcaagaaaaccaccttctgggatacaaggaaagattgcttagtgtgagcaatgaatacctatatatttttagtgtgattaatctaaatagattaattttattcaatttatttacaatgtattttacaataaaaacgtttttaaaatttaaaaaagtattgtcgatgtaattgttgtagtacaccatcgctattaaaaataaacaaataaaggataaaaaaatcttttctcatcctagaatctttttaaacgctccacagcatcaatgtgttattcttggtctgagatgtacacttctttacgtaaatatggtttttttaacgtaatactcagccaagctatctgctatcatctgtttatccatcttttggttgtttcacttaatgttatttcacgttttaaaaaaaggttctacttgtttgtttcagttattttgagatagtggactgtaagacatcctattccaaaatgagttacaaattcgatgtaaatatccaactaatatcaagttctactgacagttcactgagtttaattcactatgtatacatagtcagttactagtctgccatcacattttataaaaacagttctgacaagtcttcacatttgtagcaatttaatagagcgatatggaatgtaaatgaactagaaaataatgcattagaagctccacatatctaaattaggatggatacattaatactctcattattggtaactgccagcatttttagctaggtaatgacctgtatgattatgtttttatataaaccagaatgctatcaaacttaaaatgaagacaaagtatattaaaactaagcataaatacaaatataaccgatattcttaagaatattaattttcagtggattttgacattaaacttatatttcaagtattaaaacacatatttcccagcacactatgacttttacaattttataaaatcaaatttattgtcttccctttgaatgttcttgaattcttttgattcttaaaatgtcctctgggtgcagtggctaatgtacataatcctagcactttgggaggctaaggcaggaggatcacatgaggtcagcagttcgaggccagcctgggcagcatagtgaaaccccatctctaaaaaattaaaaaaaaaataactaggcatgatggcatgtgtttgtagtcctagctacttgagaggctgagatgggaggcttgcttaagcctaagagtttgttgttacaatgagctatgatagtggactacacagcagcctggatgacagagagcgatcctgtctctaagaaataaacaaataaatagaagataaaaatgctcttctcatcctagaatctttttatatgttccacagtatcaatatgctattcttggtttgtggtatacacttttttacattaatttttttttaacttaatgttcaaccaagctatctgctttattttatttatccacccttggttatttcacttaaatataacattttgattttataatattttatccattttaatattttataaagccataatattttaattgatcacttattaaaaatacaggtgtcggacactgttctaggcattgaagaagaaacaacttcttgatcccaacaattgtgcattctaggggaaaacaaaaacttaatgaagagaaaataccagagattatacatgtagttactttacattaagtagtaaatgataccctgatttagaaggtcatgtaatatctttgagagcattataagcacactttagccaatcatgaaattgatttagtgggtcatgaccaacattttaaaatgtagaataaaatagtggactatggtaaagaatagcatagcatgacataacataagatacaagggaaaaatcaggtactgtatccatggagtaaatgttctgagaatttgttttttgcgataagtatgtatgaaactgcatatatatgtatatgtgtatttgcttctttgtatactagatcaatataaaatgctttccttaccatcagtccagggaaaaataatcaaaaagcactgagttattgtaaatgcccttttatataaatagggttgaaatataacaattatttaataatttctacatattatgttcacttctaggtgttcctcatttaattctcacaacaagaatattatattttcttaatatcattttctttttacaggggaggaaatcgaggcactggacagctgaagcactttcttaagtgaggtttcaagatgacatgatatttcaatatacactcattattgtatacacatttaaaacagggtttgaagagttatttttcactattgagtgataaaagcattcttctattttgcaaactgtttggttcttttttcctcagttctttattcccacgaaaatgctgcagtaatgtttgaggatagaagtacatgcacctctgactatttctttggacatttacttgaatatatttaatacctcagatgtattttgataaaataatgtctaaaaagattgaaatttatataccaatcaacagtacccaaaaggttcttgaagatggaggtactcttgctagtgtacccactttctttgactaatctagagatttgagcttctctatgctattggttctttgcacagctctttgtgttaatgtctaagttctcatctccacccttgttcacagagaagctactcagatttccaagtatgcaaacttccagtgaacttctgtgaattccttctgacttatttttgccatattatctgattacctacagaatgtcaggtgttttcatttgttttgcgatagtttgtttttgttcagtttttcccatagagagaaaataaaacgaatgactagagaggtaaaatatttgttcatacttgcagttgccacacagacaggtcatgtccactgtgaactctgatttttttctggcatacaaataccccatataacggagtgcgacatatagagaattaaggtgattaaaactatttccctatgtctctgagaccatcagatggtcagagacatagggaagatagattgtcctttgaagttacgtgtttctcatcctaggtaattttcaagctgacgcttctgtttggttcagctaccagtcttaaaaatgaaatgaactgggctgtgctccctattaacccacagatagtgtatcccaatagaagattatgtgcagaagaatagcaagtctgctggatgactagggattgtttgaaagtaatattttctgggaagggagcagatattgctgctgggtataggatatttaggattttgagatctaaatgaagctctttaaacttcgtcggaatattatacccctgcagagtgctgggatgccatcagatataatagatgaagagcaaagctcaagaacatgtgtttagcccctgtaaatccttcgacgaccttgggaggtcagcccatgaggctgggtgcccagtgttgaaagtttaagttctgtggcatttaactgagtagaagaatcatgaacagtttctgataattaattaggctggggcatagagctgggattatctgataatcattggctcatatgataaacttattatatataaattttggcttagtatacaagccaaacttatatgataaactttggctttggaagatggcagaaatatagtggcttggatgggctcaggtagatagtgctgcagcacatgaggtcagctgaggctgcaggcatctgggcttgcctgggaataaacagccaaaatggctcattcacatggctggcagttgctgctgctctttgctgggatttcatcggcgacagtttatttgagtgatacaggtggcctttcccttcagcttgggcctcttaaagcgtggtgactgccatcaaagagaaaaaaagtagaagatgccaaagttttcaaaggttggcagagtaccagcatgtcacttttgctgtcttctaataaacttgatcccctaaaagggagtggaatatacatacaaggagagaataaattgaatgcattacctatggagtcttctgaccacaaaagccttttatgttaaccacatatttatcatatccagcaccctttactccttcagttaaagactctatggatcggcctgcacactcgctgacctttcctttggctgtgtgccatctgttatagtgaaatttttatttcagatattactgttttcaattctggcattttcatttgcttttcttttatagtttgtatttgaggagattttccatgtatttattatgatgtccattttttctaagtccttgaaactgtagtgataggtccattaaatttctatctgctagtttcaatttgtgatatttctgtttttatattgtttcatattactgcttcataaactgctacagtcttggtgacttaaaacaacacgaatttattgtacagatctgtaggtaaggagtctgacaccacggggctcactggactaaaatgaaggtgactgcaggactgtgggctagggtttttctagtttttctagtctttctagtttctagaggctgaatttactaaattcttgtttttgtatgatacaagatattcttaacccacaccatattttaatcaggacttccgtttttagggtgtcaataggaggttttgattaataccaacgtgcactctttaacgtctgcttttgggtacttatttctattcattttgcccatgatattttatgttaatccactcccaaaatcaccaggtgccctgcagatcgctaacagcatgcctcgaacttgctctgataattggtgtcctcagagaatctttttcaatgtttgaaaatatgcccttgcgccgacatttttccaaaccccatctatacgtttctccatctgtacttccgcccacctcatctatctctatcactccagctcttacactgaaatacttatttcataggaaaattctatactggtaatatgtaaatatgggtttataagtcaggtagaagtcttatgttgagaataaatacttttctttttgaggctttaaaattgtttgtcacttctacatacttcagaacaaaaaataaatcacaggaatatccacaacaaatttgtgtgtgtgtgtgtgtgtgtgtgtttcttgtggcctatagtagattcaagaatgtcacctttctcccagaaaagaaaaacatgaggaatctaagagttcacttatgcaacatcagtttcatttatgcacatcctactcaaacagtcaatctcagacatgttcatctatttttttaatcctttaagacaagattatgtgtgtgtgtgagttttgtgtgtgtgtgtgctttgtctatatataaatgtgaattctttgttgttgaactttgtgtgcatgaaagagagagagagagagagagagagagagagagagtgtgtgtgtgtgtgtgtgtgtgtgtgtgtgtgttagggatttagaaggtataaattttgggtttctcctagaggaaaaaaggtgcagttcatttctcaacactcaattagttacctttcctattaattctacattgaaaagccatgcttatcttgactatttaattaatttgttcctattcattgctatatttctagaatatagaatatagcacataacatcatttgttgagataaatgatgagtaattaaatagatatttctggaagaaatttgacttatgaagaaatatttgaaagtatcaactgtgtcaacaaaatggtaaactttgaaaataatcaaattattctacatatttctttataattttccaagatcggcggtttaatgttattacatttattacattacagactcaaagttggtaaacatcaatttgacatgcatcgttttgcatcttatcaaagtgtatctccaactagtaaacatcagtacaatcacaccaaatgacaacgtaaatgttaaagttttctttaaaaagcaacaaaaagaaacccatgtaataacaccaaatttcacctctggaaattactggcatgcttattttgcttgcttttccattctaaagggcccattttcatttcgcataaagcgcacatttccatgactcgtttttatcacctcttaaagtaaatatctatgttatgcggcctctagttatggccaaggagcagtgatgtgtaaacaaactgtatatttcaggtgagacaaaaatgtgaactaggtcatgcagacaaggcaaaatgactccgtgtttagaaattgaacatagaattactgtagaagcttcattaggcaattgtgctacaggaataatattatgcagataaggtgacacaatattataaaacagattctagaatactttagggtggtctattatcaaccaattccttttatttctgtaattgaactcactcaaacagctgctttcatggaacgaagtaaattagttgctagcctagtgccattttatatatatacttgtgcatatatatgcacatatatatgtgtaaatgtatatatatatttatgtgcacatatatatgtgtaaatgtatatatatttatatgtgtaaatgtatatatatttatatgtgtaaatgtatatatatatttatatgtgtaaatgtatatatatatttatatgtgtaaatgtatatatatgcacatatatatgtgtaaatatatatatatattctttttggtgtagaaaaaacctgcttatatgacagccaaaaactcaaaaaaagagagagataaggttttaattcaggtgatttttgttgttggcttgccagaaaatgaccatatattttggcagtgaccataatagtgtggatcataaacaagcagaattaagacagagtgctaagggaaagaattcaggcagcacgtagttatctaaatgaaaggcactgaaatgtgaagccagcggagactcagctggaagtaggggcaaaagtacactcactgaataggacctctccatagcagacagccaaggcaccaatgaggaatatattttgtctgaggctatgaagcaacaataagccaagattctagattttccttcccaagttataacatgattattaattaaagtattattactttcatttaggcattgatgaatgtagtcttaaaaacttacttacttaattcaacctgcagtatgtgtcagaaactacaaatatttactttgagtttttgataattgtaaaagttcactattatcaatatcatttttgctggaaggaatttaggcccaaacagtttaagaaatttgcaaaacatcaaacagagaatcatttggcaaaaccaagcaacaaaaacacattttagctataacacctcatgtaatcagaaaagtgtggaggggtatgtatctgagaagtataaccagtgatccttgcctttttgtgccttttgtcattattcctgtctttgtgcaacatccatttgttatttctgtagattggttttcttcatgtagacaaactagggcaccagtggctcccggactcatattttctagtttttctattagataacaggggtgttattctctgcactccagtttaaataattccatgaaaaaactccaactggcctttgatttagtccatacacccaacccctgacactgtgactaagaaagggggattgtggttgtccaatatggatggatgccgaacttagtccacacactgttatcagggaggcagtcatgtaggaagagagtggttgtattagtttgctagggctacagcaacaaactaccaaaaactggctaacttaaacaacagaaatgtattgtctcacagttctggaggctagaagtacaaagccaaggtattggcagggttgttccttctaagagccgtgagagaagaatctaccccaggcctctttccttggcttgcacaaggttgtcttctccctgtgtctcttcatgtgccattattcctgtgttcatgtctgtctcaaaatttccccttttcataaggataacagtaatctcactttaacttgattacttctactaagaccctatctccaaataaggttgcattctgagatactaaaagtgaggacttcaataaatgaatttaggtgtaaggggttgcaaaattcaacccataacagtggttcttctttgaacaatatgggtgaggtttttcaaaagaatacaagatacaatttcttgattacaaactgcatcatttcctatgtattaactatgatgccgatgcaccctcagttgctccagccaaatggtatgtagttagaaaaggttgtatatctaaggtctatacaaactagagaacgaaaaatttagggcctcttgacattttctgccttttgtcactgtttttctctctgttatttcaaatggctttgtctcttcaaagcttatgccatatcacaacatatttgtttttcaaaatcactaacaataaatataattgtgtatatgcattttttcaaagtatagagaaagatttacctaaaagagtttgttccaccagtattgtttacattacaggacaaataaggcacctgcagatgagggtgttccaatagtgtttaattaatttgcagaatcagcactatgttttggacggatggccaagttaaatgagtctgctatcaccaaccagccagcatgagagaaacagatcattaagtctgtaattttcacaggtaataaagatctaaaaataatcactgaatgttttgccccatcctatgattatagatttaacccctaaagatgcaaactaaaaccatgatgctagccaatacttcgagagatgagcataaatatacttccaatatgctatgaaattccatctgagtcaagtagttattagtacattaatgagataaccagttttattttagtggttgcaaaactggcttttttggtgtgatattataatgaacatatttgtgattaaatgacaacacaaaattggcaacacactgaaatggaatcaatctgccaatataaaatgccactagttaatgcatagaaaacagattttacagtcacatgctacataacaacattttgttcaatgatgaaccacatatacaatgctagtctaataagattataacatcatatttttactgtatcttttttatacttacatatacaaatatttactttgtgttacaattacccacagtattcaatacagtaacatgctgttcaggtttgtagcttaggaacaatagattgtaccataaagcttaggtgtgtagagactatccatctaggtttgtataagaacatttttataccacgaagtttgccgaatgaaatttcctaatagtgcatttctaagaaagtatccccaatgctgagatgtgcatgactgtatatagtgaaatcaaatggaaagcctaatggtagataattgatcttcagacatgtttcaataatattctgcagtgaaacttaaagcaaagcagcacatgcaggcctgctggggaactgcaggtggactgccctctgtctggttttcattcattttaaggtgactcttggagaaaggcattaatatcaggctttgcaaacaccagctgcagacccaaactaggaaactggtatgttagatacgtgtcaggcctcctggttgcacatatagcaatggatcactgccaatagaaggtggttatgccattctccccagagtcattggagaacatgtttctgtattcacacagagacatttaggatcatgaaatctcataattaaagtatcaataatacggatctgagtagttcctcttcctgagtatacatcatagtcacctggagaacttctgaaatatctttgggttcgttaagtgtggaccggggcccaggaatgtgggtgtttaaaaatactctaagttgatctgccttttcttctttcaacttacctccacacctatctagtgctagaatattctggatgaatgcagtcagtatctgctctgacgtaactttgaagaaggaaaggatggggaaggaaaacattatatattgtcttataagattcttatcattcctgccttgtagttttgttactccacatctccttgatgtcactgacaacttgatgtattcttcatcatcattccatataaaatgctcattttcagaccataggggaatactctttatggcaaattgtatatggccaattagttatcagatttctgttgatttttgctataaccaatctatggttacaattcaactatgatttgacaagtaaagttacatcctaatcttgtctttttccaatacaacatggtcattggctcttatatatgacctactagtcaactatttttaaccttcatgcaagttgtatttattaaactaaaacttatttcaacatcagcattaaatcaatctctgatttgtagcacttgctgatttccgtgttgtaaatactcccaccatagctgattgcaacatacaaatgtgaccttaatgaatgaagagttggcaacgtgttagtttcctggggctgttgcagcaaattaccataaactgggtggctaaaaacaagaggaatttattttcttacagttctgaataatagtagtttaaagtcaagctgtcagcaggatcatgctctctctgatggctgtaggggaatgtccttcctttactcttcctggcttctgaggaatgttagcaaacactggaatttcctggtttgtagatacattagtccaatctctgcctccctcatcatgttacaagtagaagagatcccagttaccctgagttagcggtggtatatctgtacaggtctgcagcaacttcagtcctttctcctcagaagaaagaatttgacttaggagcataaagcagaaaaagataccaaggcaagtttcaaccaggagtggaagtttatttaaaaaggctttagaacaggaaagaatggaaagttcacttggaagagactcaagagggtgcctgaaggtgaaagagggaagagagtgtttaccctttatctaagggctttctaaactcacctctttccccatgattcttccctttgagtgggctttccacttgcatggtgctctccttacccttgggaattgagcacacacagtgtgtttaggaaggggtacacatgcccatctgaggcttttttccctttttctggtgaagtgaatccagaacgtcatactttgccatttttttgtgtgccatttggtgtgtgcaaacccaggcagtttcttctccttggagtctgcattcatttaacactaatgttaatagctgtggatcatcaggaaatggcctctccctggcactctgggtgggctgccaaattatcattttaaagaggtagagtgataattgtcaaaccatcacctgacattcctagtgggttggggaagagccatctcctgccccgctcatgactatctaattacctgtgacaatcacacagcattctccctaactgtatctctgactaaattgccctcatcttataagaccaccagacattaaagcagaacccactctaatcctgtctggccttatctgtatgactttattatgttcataaaaaccctagaaattcacattcacaggctctaggtattaggacttcaacatgtcttttggggaggacaaagaatgttatttttattttacataattttgtattgattctgcctatataacagatatttgcttcaattttgttttcctttaaaacaaactgaccatgttaattcactgaatcggcaaatatgtagcaaatatctgttatacaataggcacttttcaagtcactggaaatataaacaggtcgtgagtatatcatgtaatgacttttctaatatctgggaatatctcagaaaataccaagaaatccttgccctcggggagctgacattctagtagagagacagaaaatgatagtttagtagacattctagactttgtaaagtagacattctttaaagtagtgttaaagtgctattgataacagcaattttagtcagaaatatggagttttattttactgtggatgatctcaaaaggtctttctcatgtgttgatccttaaataaagacgttaatgaaatgaggaagcaatgtgtatgtcttgtaaaactgagttggaagagggggattattaaaaacaatggatctgatacatgggcgcatttggcaagtatcaggaagacacttaggccaaaaagaaaaaagctatttgaaacatgatgtatgcagtagcaaatatagtgtctgaagtaatcaggactcatatcaagtaggacccaatttaaagaatggtagggactttaaagatggaaactttggaaaagtgaactatttcataataaatactaaggaaaacatagattgtaatttttaaagcttttaaatccagaagagcattaattgattatcatgttaactttaaattgtaagacacattaatcattcattaactactgaccactttaaattaaaatgtcacaaaatattaatattctaatttttgatgcattgtattaaacttacttacttttaacagtgcatccttgcgctcattaccaagcaagggagaacaacacatattttgtttaaaaataacacaggggcaaaataaaatacttctcagtctagaactaacatgtttaaaccacttcgatttcatataaggacattactgccatactgaaaacttggttcttaaatttttacctttggcattgcatacctttttagccaaggttaaggttatgcaacggacatccaatataattcccttgtcttcacagaaggaaagtaataatggtgactgggctctgaagagaaggtcaaatgagacacaacatagatttctttatgttttgtccagagctgtgcttaatttcagagagtttgtgtttaaaagtggaagataattcatgtaaaatatgtttcattatcatttgtagaagccaggcatgtgtcccttaatagtaaacgttcctaacatgtcagaatatgagttcacattgtcacagcaaagagagtaagttgctcccaaatatctatgtgtccttcctgtggttgggttgagtcatatatttatttctgaccagtaggctataaattgaagcaatgtgtgtctgttcctgggtgaggcaggtaagagccctggaagccacttatccagatacatagcttgaaggtggaacagaaccacccacctttattaaactctgaatgaacaaaaatggaaacattttatttttcatttctatgtgttgattctgtagcatgcctaacattatgctgactagtatagaaattggaccaccagtagaatgctgctgcaaaaataaggaaacctaattataaggtatcaacttggtagttgggtgggggaaggtaaagaaaataagatccaagcgtaaagagatgaagatccatatgagcagtagcaaaacatgctgaaatgttgcctaagatcacctggaaagcaaatcctatgcctactgaacatgcagctctagggtaagaagttagaaaacatgatgttaatagtttgtgagcatggctagggctgcatttagtaaggtcttacaagaaggtgacaagctctaaaaatgattggtcaatttgccagtgccaacataaaaacaaatgcagtcctaaagaaatttaatttgtaaggtttattgcaagaggcaggaaagagactattgcaacagaggggagaagactcttgcaataaaggagagtattccaaccatgagatctgcaagcttctcaaaattcaagcagaaaaggtattttctttatgggaaggaaaatcaagtctaaaaagaactaaaggtgcagttggaagatgataaggaaatgctttccctgaggtcagcagattatttttaaggtggggctgtatgcttgctccagctgaacggggggtcaatattcagagtcttttggggaggaaagaatcttaactaacatttggtcaagtcacttaacaggcattttgttttgattaatcagtggggacaaaaaaattcccctaaactcatatgaagcaaaaacagaaaatgtagaggtctgtgtctgtccttgccataagtaaacaagagagtcatctgtaagtgcaatagtaaatcatgggggaagggcagttttctgccacaagccttttccacaacatgcaagggtggggggatttctttaaccatgactgttttccaggtgcacggggatcagataaagtttaacattgtcacaagtaaaatttgtgacacattcaatgactgatggaaaagtcaatttctgttacatttcaaagacttggtgcaaagaagcctagtaaaatctttcaaagagtggcatgggttaaatatgaaattaatcataataaatttccagaaacctccattcattgagaggggtcatatggggcaggaaaatgaaattccccagtaataaagattttagaaacatgtctcccaagaactttgggtatggtaattagcacatgaaaatgacagaaatcaaatagataaacagagaaactaaacttttatggcagttttgttgggaaaaaatttaagagactggggtagaaaactttacctatttgggatttttaaagaaatggtctctaagcttccccctgtcagaattaggctgagaaaactgtacaactgcaggaaagcacatatcccagtatctacctcaaatacgaacaagtgtagctaatcctgagaacaaaaaagtcaagagccaggagaagaaggacctctgagaaaaacagactatcagatcttaatcatgaaccgcatctcaaacctagaatcctttaaagtatcttcccagtgacatttaagaattcctgaagaccagtcactgacaggataggaccttgctgtatcctttagggaaggtatatgtgtgctgcaggcatggaaggaaattaaactgatgtgtggcagacaggacagattacatgtcttctctacttttctttttccttactatggcagcccccatagtctgtgcagaagatttaactacagatggactaggatactcaatacattcagattatataagtgtaagggataaactgttatttattaagccacttagccacattttaaattttcctgttgttgtaacttcagcatagctaaacatttcactatttaaggtaaattgtaaaccacatttgctaatatcgtcataacttccaactccatctgcatgatttgttttctaatttctgttctataaacttacatataacatgtgcacacattatgtgtatgcctagatccattctttgtattatttttacacaaagcaacatgctactctccttaacaaattgtctatttatagtattctccctgcaatgataactatttaccctgatttttcctcacatatgcaaaagaaatactgattttatacagtgttgtggaaagaattctttttaaaaagactctttggcacactatcaactccaaatttgtaacctactcagattacttacaaagaccttaagtgtattagagttcaaataagcaagaatttttcttcttcttttttgtttatttttacctcatctcaggctctgttttcaaagaattttgctatataatgtactgtcagaaataaacttacggagaaattagtttttgttactaaaataaatatattgttactcatttaaatcttgttttagaaaggctgatcattttattctaatgtaatatattgaattatgttatagcaataatgtgatatatgaaatctatagcattatacacataaacccataacaatcaaattataaactaactggctattaatatttttattagaacattcacaatgtaaatattaatttatatagaaagtacaaaatattctgtgcaaaaaactttactgcttctagactaacatttcttacatatgcatatggttatatggtcaagttattagatatgcaatgaaattcatggtatgtctggtttcatcacatgctgataaataaacgttcttactttttgtgcagtttaatgtatattaatggatcttcacacagtcactcttaaataataataatcattaccctttactattaagtagcgtttccaaagttataacctctcacaggatgccctttctgaaggataatatctgcatactcaaaatattttctttcttaaatgtctagattttgatctgtcttatgacacatattataaatctgaaaaatgacaacaaaacagcaataattttagtaacagaatccctaattctataatcttttctctacaataggtatactttttaaaattttcagtcgaactaaagagctttactaactaatatataagtagacatatatcattcatcggggactccccagaaaccataactctaaacatctttgaaaatctagaaatagtaaaaagttcaattttctatatccttacaattcaaagtgtggtccataaagtacattaatatcctctagtaatttattagaaatgttgaacgttaggcccttctcaagacccaccaaatcagaattcgtattttaataaggtatccatgcggcttctgtagcttcattaaagttgggaagacactgctctttaccctacagtaaaatgcttgtttatattttgatataactgaaaaggaaaacagtcataattaatatgatgctaatatttcataagtaaactgataaaaagaaaagaatgtttataggaccttaatgaaaaggaactcttcttcccccactctttcttcaactcttgtgaagactaacacattcctactcattgcacattaatatactttgtagaaatacactacatgttaacttgaagtttctgaggtaattgctaacctcctatttccaaagtggagttttcagattggacaataactctgaaaaaggatttataatcgcttactaggaatgagaaatggcaagaagagattttcctctctcttaagttgggtccttacatttataatgcacaagggagaagtaaggtgctgtttataatattacaggactatattgtgtacaatatgctaatcattccatcactttttttcctatccagataaatctaaatttcgttttttgtaaaggcaatgataaaaatattttctatagaaaacttgaagaagctgtttacgtaaggcaattaagaacttgcctagatacaaattcattgaactaaaaaatatgttctgatggccattcaagcttgaaaacagcaaaacatcagtttgcagatccagaaaagggccttagagagcaataagagaagatgaaaatcatcattctgagcacattaaaaaaattagccctgagatagcccctctgttttgatactcatttatatcttaaaagtagttttaaaatagatttatagataaatatttgtgacaaaattcagggaaaaaaaagaaaaaaacgaatgaataatacttgattttctgcaagtaaatttcaatttatttttaaaagtgcagtccttttaatgttactcattttaaatggagcaaaaaatgtcattgtgaccattaatttcctcatctgtaatgtatgtttgtgaataatgaaccatatttccccactgtgtaaactacaccacagggacttaaaacactttcagaaagttgtacaaactcttttgggtcactaggataccacttaggaaattagcactcattacagtaaatgatatcctggtggcttggaaaggtcgacacagctttccaaaaattataactccctcagaaagtatagctcaatggtgattacattatttgtgctgcatttatcttgatatttttaaataaagattttcttgtggtgtggtaaacaagagagtatttttgctgcgtatgtaaaaaggctaactaaaatatctttaaagatatctttcatatgctctgtaaataaataagaaatagttgatctcttatttgaaataaaaattattctaatatgttgtataatagattacaaataatatgcctattagatcacaattctgtactttaccaataggctttaattattattgattatacatgtatatagaaagcaacagatattcgtaactactatttaaaggcattaggatgtgattcatacatattatttccactattatgaaaatatttggcatatatttaaatgacagaatctgtgagttaaggtatgtacaaatagctaacattcattgagatattaataatgattgctaggcaatcttctttgtatcttatgtatcttaatttagtttttcttcttaacaattttctgaagtagggacggatatattattatgtgcttggacatataagaatagataaggataatgatcatttgaatgaatcagttaaatgtgtaggttcacacagaaaattaaatgctaatttccatagccaagtctatcttaaaatttgcttggatttttctatgctatactacagagaagtagattactcagtttttaggagaattgagtattcacaatgaattctatgatgctctggaaatttgcaaaattaaagtcaactacagtgcaaactcactgtaaatacattgcttggaaggaagtcttgtataatcatcttcacttttaatacatataagcccttcaaacacagcaagccccaaacctgctccaaaggtaattttctattgtttagcaattgttacaattgtccctatccagagaatatttttttctaatttctttaactcagcccacttaaagtcattactaaaattttcaacaacaatgctgtattctacaaaaacactatggttaccttagtccaggacactagtatctctcacttggattacagcagtaatcacttaactgacctcagtgacagcttacttctgccatctcactccatttctcacatttcaatcaaagagatcatttaagaatgcaaatcaataactgaattcccctttaaatactaatgagtgtatttgcaatgtgtctaaaataggatcaaagtctctatttctttctttgttatttttaaactacaaccctttacccagccaaactaccaaacaactgtgcggggagagtaaatgcatcttcagacatacagattatctagaaaatggctttgaaacacctttgcttagggatttctagatgatatgtacatcacaaatgagaacataaactaagaaaaaagtgtagttggcaaagtgtccagctgcttgttgcttgtagaaagaagccaaaataataatgagttgtgatagaaagagaggagctttatcagctgcactagcaagggaaaaagagggaggaattatttcccaaaaatctccactccaatttgtggagggaaggcaggggtttttaaagagagaggagtttggaatgcaggagaggaggggggcttggatgcatcaggtggtgtgatccactccaatggcttaatttgacttatttttccatttggtgaagaggccgacaccatcctgggcccaggcaggttacaaattaattgcagtcaatcttgcagttaatttctaacccctagtgagttttggccttgaccggaggcagaattctggaggtacctgatccatgtaaggacctagctcctgatgtttctaaagaaatatatgaccagataagtgagcatggtgtgtgcttaacacacatccacataaatgaatgtgcataaggcatgggggggtagaatgggaaaagaaaggaagtggaggtccacagcacatcctgaggctatagttcaagatgaaaggaaacatatattaagtttgtctcaaaagttatatcttgagattgaggagaaaggagaaagaagataaaaagtttaaaaacatggtttgaagccaagctagctgtcctgttacaaaatgacaaaaggacacataagatacaatgaatactcctttttattcaataaagggaagagacaaagggaatctccaggataatgaacaaaagaaatagtacggcagctgtgcgcaggatatgtgatattgtccattaaaataagagcaggctatatatcctgggaaatgttttattggtaagataaaatttatataatacctaagtatctcaacacagtaaataaatttgatgcagttctttggagaatttggagttgaaatggtgacaaaaacatgcaaagataaacaaatgaaacaaaataagataattattaatgccacaaaaatatgtatttttaggaaaataaatatattagtagttttctacaaggttaaaatttaaatagtatttaaacacttattgtaacataagtctggaatatttatctaccataaattttataaaacttctttgaaaaggtgattaaattgaaagaatgtcttgtattgtatgtgagaaataaacccttatgaacaccaggaagtgactgtttttcctattctgatgtcccagtttggtatttagatcaaaagagcaatgatggaattatagaagcaaggaagtatttcttaacactgatttagactgcaatggaggaaaaaaaagagataccaataactaaagattatgcccttactttctctagtttatactttcaaagcaaaaataagcaaataagtaaatcaaaaaactactctcccctaccaatcttatatttattttaagccctccaaaattgctaccaatcataacgatgaagatgttcagactcattgattttcattccttaatattattgtattagccagggttctctggagagacagaactaataggatatatatatacacacacacacacacacacacacacacacacacacacacacacatatacacacacacatatatatacacacacacacacacacacatatgtatatatataaaggggagtttattaagtattaactcaaatgaccacaaggtgccacagtaggctgtcagcaagctgaggagcaaggagagccaggatgagtcccaaaactgaagaacttggagtctgatgttgcagggcgggaaggatccagcatgggagaagaatgtaggctgggaagctgggccagtctagtcttttcatgtttttctgcctgagtcatattctagccacactgacagctgattagatggtgcctacccagattaagggtgggtctgccttgcccaacccactgactcaaatgttaatctcctttggcaacaccctcacagacacacccagaatccatagttttcacccttcaatccaattaagttgacactcagtatcaaccatcacaattattattactttgcatgtgatttttattataattttattatcataagacaagggattctcatatcataagagaatacacatgaaacagttttagttggagtttggtctttgccaaaatccaattaaatattttaagaagatagaacactcagttgaacaaatagccaagaaggaatttgaggagagtaggaatttgatagcacttttctcatctttgctctacattcttgtatttgatatagtgaggcaagatgaagtagaaaacttcctaatttctggatcctccatcaggaaggaatgaaaagaatgaaacttgtgtttaacattctggattttcctggagaatgttcaaggaattggtttctgttctacctgatatgggccattgatggtaatcattgtataccttggaaaccaagtaggaggtctgtagtgccatggagtattaggacaatgaggagttgacagttttttcaggtaggcacttgggggcaaaaggagtgtacagtgctttcaaattaggaatgcaataaaaataaaaatgaaagctttgagggcaagcatcttgagaaaaataaacagttaaaagcattgacatatagaataaaaccagactcacaagttcaggaaagacatatcccagaaaattcttgagaggtctaagaatctctagccaagctgactagtaaaggtcttctcctgcatggaggcagtgcgtaaagattacaagagatttttatgcttttttcaaatacataaatctccataaaggtcacaaggcatacctagaaatagggaaacataggataaccaaagagacaaaataaatctccagaaagccaccctcaagaaacacagatttcttaagtactcgacaaacaatttaaacaactttcttaaagatgttcaataaactaaaggagaacacagatggacaagtcaacaaaatcagcaaaatgaggcaggaacacaattagaatattaaccaataggaactataaagcaaagaaccaaacaacttttagagctgaaaaatacaatacctaaattgaaaaattcagtagaggggttcatctatggtcttcaccaggaagaagaaagaatcagcaaacttgaagacaggttattcaaaattactgagtcagaggagcaaaaagaaacaaaacaatgataaaagtaaaaagaaacaattgaaattactaaaatcagaaataaaagagaggacattacaattgaagccacagaaatagaaagctttataagaaaatacagaccatgcacaatgtgagggtttggagttctgaacccccacacagtcgaaattctacatataacttctgacttacacccaaatttattactaacttactgttgtttgaaagacttactagtgacataaacagtcaattaacatatattttgtatgttacaagtatcgtgttatattctgacaataacattagttagttaaaaatgtaattaagggaattataagcaagagatgacatatttattattcataaagtgaaagtgaataattctaaaggtctttatcttgtctcacattcagtaggctgacgaggaggcagaagagtggttgatcttgctgtgtcaaaggtgacagaggaggaataacatctgcatattatcagatccatgttgcacaaacccatattgttcaatggtcaactgtactatggaaaaatgtacacgaattttgggtgtactatgaaaaattgtataccaaaaaattgaatgaactagaagaaatgaacatatttctagaaacacacaacacactgagcctgaattgtgaagaaataaaaaatctaaacagacctatagtaaggagattgaatcagtagttaacagtcttccaataaatgaaagcacaagaccagaagccttctttgtagatttttaacaaatatttaaataagagttaacatcaacactcctcaaaccatagtgacattttgaagaaagaataatttcatactcatttcatgaggctgacataatcctgataccaaaccccagcaaacacactacaagaacaaaaacttacaaatcaatactcttactgcttattaatgcaaaagtacctaagaaaatactaacaaactgaatccaatatcacggggtttatttcctggaatacaaggacagttaattaggaaacaatcaaagggagctggcaaaagataaaagaaataaaaggcaactaaattaaaaagaaggaagtaaaattgtatttgttctcagatgatatcttatgtgtagaaaaccttgaagattccacaaataaatgtttagaagtaatgaaaatatttagcaagactgcctgacacaaagtcaacatgcaaaaaattagttgcatttctatacactaacaataaacaattcacccccaaattaagaaattaattccatttacaatactatcaagaagaataaaatactttggaataacattaacttaggtaggaaaatactggtacatcaaaaactatttaaaagggaattatttaaataaattttgaaacacaaataaatcaaaagtcacgctgtgttcatgaatttggaacacttaatattgttaagatgtctatactacccaaactgatctacacactcaatgcaacctctatcaaagtcccaatagcattttttcatttatatgaaaccttaagggaccttgaatagccagaaacatcttgaaaaataagagaagtctcacactttctgatttgaaacattataaagctatagtaatcaaaacattgtggtactggcttaaagacagacatatagaccaatgcaatagaaatgaaagcctaaatttaaaccctcccagatacagtcaaatgatctccaataaaggagtcaaaatgactcaatgggcaaaagacaatcttttcaacaaacggtgatgggaaaactagatatccatgtgtaaaataataaagttgaacacttagtttacgctacatacaaacaataattcaaaatggattagagacctaaacctaagacctcaatctataaatatcttggaagaaaacatagggcgaaacttcatgatattgcatttggctatgatttccttaaaaagggcatcaaaagtatagtcaacaaaagcaaaaatggagaaataggactgataaggtttggctgtgtcccccctcccccacacccccgcaaatctcatcttgaattgtagcttccgtaattcccctgtgttgtaggagggacccggtgtgagataatcgaatgatgagggaagttgggcagtttcccctatactgttcttgtggtagtgaataagtctcataacatctgatggttctataaggagaaacttaactggcttgattctcagtctctcttttctgccaccatgtagaacatgccttttgccttccaccatgattgtgagacctcatcagccatgtggaactatgagtccattaaacctcttttttttttcataaattacccagtttcagatatgtctttatcagcagcatgaaaacagattaatacaaggattacatcaaattcaaaatttctttgaatcaaaagacaaaatcaccacagaaaaggcaacctaaattaaggaaaataaaatttgcaaatcatagatctgatgaaaggttaatatctagaatatataaagaacacttataatttaataacaactaaaataaataacttgattaaaaaatgagctaagaacttgaatagatataccttcaaagaaggtatacaactggctaacaaacagatgagaaatgctcaacatcactgatcattaaagaaatccaaaacaagttgacaatggtacaccatcttacacctgttagatggcttttttcaaaacacatagaaacagaaagtagaatagtggttgccaggatttgggaggattgggaaatgtattgttgttgctgactcagtatagaggtcagttttgcaagatgaaaataattctggaagtgttatataacattgttaatacacttaacaatactgaactatgcacttcaaaatggttaaggtagaaaagtaaagtaaaacatagttactttaaaataatagtaaatgggaatttgtacagaaatagtgaagtagctgccaaatttctttttctgtaaaaataagaacactgtcaaaattatcaaaattaatatttttagaactttgaaatataggtaacagtttgtaacaatgtgttgcaatttagtgccgcaatccctaaacagctgaattgggagatctgtggctttttaatttgccctttcccagatacctctacccacctctgcactaaccataaaaactgaaaaatcacagccccacaatcacagtgaaaaccaacagcttagcaatcgctgggtgaggagaaaatggtactggcgatccctcaaagcaacattctcagagaattgtacagatgccccttagactgaggttattccttgataagcctattgtaagacaaaagcattctaagtcaaaaatgcatttaatacacataacctacatcatatcttaccctagcctaacttaaacgtgctcagaacacttacattagcctacagttgggcaaaagcatctaacagaaaacctattttataaaatgttaaatatttcatgtaacttattgaatatagtaccaaagatgaaaaacataatgtgtttatggtttcttgaagaaggatttctactgaatgaatatctcttttgcatcatgataaagtcgaaaaatagtaagctgaatcactgtgaaagttagagactgtttgtaattttttgactactctggcaaccctcaatgcaaggcttgtctttatttgacctggctcaactattttcccagtgtgaacaacctattctgaagagtgttggttagaaacaatcagtgcaatcattgaacactgtggctgcctgagactgcaaaaacagagggaaaataagaatttgactaaaaatacttaaatgaaatgtctgtaaggggtctataaaaaatgtttgacacattcctgggaatgcagtaggcaacaagctcatgtgcatcccaaggctatgcacagacctaagaggggacctgagaaggccccaggttttcacctctgacggagttagaggctctgtacaaacaggtatgggaagctgccttcttgagcatggaaggtattcctcaacacagacactgaattcagtagcaaacaccaggacacatacctgttctaaggacttaaggaaatcttgacgacaagttggtttactattaatttaactgacaaagacttcagtggccccttatgacaaataatacagattttatataatcattttagaaaaaagtcacgaaacaacagtaataataacaacaacaagaaaccacaaaatctttaaagaaggtagaatgtgatttatatacttagtgcattgcaatatttaaaatgccaagctttccacaataacagcaacgaaaaacacatggaaataataaagaatggcacacgcattaggagaaataaaactatagtctctagagaagcttcctggggaagctcatttattagactgggcttttatatcaagttatgaaatatattcaaaggactaatgaaaagaatgtttaacaaactaaataaaagtatgagaacaatgtaacaaatagcaatagagagagagagagagaatttcttgaaatagaatctgaagttgacaaaacaaatgtaaagtgtagaatggttcaatagctgatttctgttccagaaacaattagtgaatttgaaaatggatcaaccaagattatttattctgaaaaacagaaataagaatgagagcctgagaaacctgtgtggcatcatcaaatgtaccagcatatggacaatgtgagtaccaaataaaaacagaaagaaagaggcaacaacatatgaaagaatctgttgctaagagaccaaacctatgagaaatactgaaggaaatccttcaggttgaaacgaaacatggctagactttagcttaaatccatacaacaaatgaagcacactgataaaggtaggtacacaggcatttaaaaaaaacacaatgtatttttgtttgtgactcttttcttcttctgtctgatttaaaacacaattgcataaatcaacaacaaaattatgttgacagtgttataaggtataaatatgacatttggatgcaaatatagcacaaagaataggataaaaaggagctatattagaataactttttgtgtactattgaaattaagtaggtattaatctgagctagactgttttaacattaagatgctaattgtaattccctggacaagcaataagaaatatttcaaaatatacatatcagttgaatatcaagggaattaaaatagtccacttgaaaatatgtactaaacacaaaacaagtcaatcatggatgaatgaggcaaaaatggtacatgaaattcataaccaaaaaaataagtcatatagacatataataaataaatagcaagatatcaggcataattacattaaatgcaaagggagtaaagactttaaagttgtagatcagcagaatgtactttggaagaatggccaactttatgttgtctacaaaaggcacactgtatggaaagtacaaagaggttggaaaaaaagatgggaaatacacggcattcaattagtaaccaatgaaagttgaagtggatatattaatatcagataacataaattttaataccaaaaaaaggtactagagaaaaaaatagttgttttattgcaataaaagtgtaggtctttcaggaaggcagaacacttatatatgaacttaaaaatagaacaccaaaagacatgatgacaaaaaccaaaaattgaaataaaaagtagacaaacagtaattattgcagactgacaaaccctttcaataatggatatcacaactaggcataagatcaaataataatagaaaatttgaacaaccattcctaataaacatctacagaacactccacccaatgacatcagaaaatgcattcttctaaattatatctggaatattctgcagaaagaacatatgttaggtgatgaaataagcttcaataaataagacttcatcaaaattgaatctttttccttcaaaataaaacacaatcaagaatgtgaaaaaatatctggataatgggtgaaagcatctacaaatcatgtatctgataagacagaggtccccagccccagagccatggaccggtgctggtccatgacctgttaggaaatgggctgtacagcaggaggtgagtagcaggtgagcattactatctgagctccgcctcctgtcagatcagcagtggccttagattctcataggactacgaactctattgtgaacggcacatgtgagggactaggttgcctgttccttaagataatctaactaatgcctgacaatctgaggtggaatagtttcttctggaaaccatccccctccccaatccatggaaaaattgtctttcacttagctggtccctggtgccaaaatgtttgggccccactgtgataaggaacttgtattcagaatatataaagaacacaaaattcaactgtaaaaatacaaataatatgattagaagcatgagcaaaatatttgaatagacatctattaaacagaaagaatgattctttagccatctctctctggttcttaaaaaatatgcttctacatctcagagccagcaatgttgtatcaaattcttttctcaaccagaatggcctgagttcactatctgtgacatttctcttattctctttcattgcatttctctgaccttagccagggggacttctctatttttaagagcccatgctattatatcggacccatatatataattcaaaataatatttttgtcgtaatgtctataaccttaattgcatctgcaaagccccctttgccatgtaccataaaatattttcaaattaaaaggattaggccacagacatctctggaggggtggcatgctgtctactacatatacctcatttatacacacacacacacacacacacacacacacacacaaataaatacatactgtgggttctaagaagtcatccaaagagcaaatcttccactccatcttctattgagataatattgttccatttgaaaaaaaaaaaaagatctgtctcctgtctaggggcagcagttaatactccattgtcctatgcacgatagtttctgtggggtctgttggcaagctgagaacttccacccagccgtaaggaagattaataaagctgtgcaactttgtgctagtgagtattctgaattataccttctccaactattgtcagcaggcctaagagggagctgagtcatctagcatcagggagattgaacaaggcatcgagagttcaagctaatcagtattctactctccacacacctagcgtcactggggcccagagattacctgaacttcagctcccacagggtaacaatgatagtgaatgaggcagtgtgcatcagggctactgggcactttggtaccttccccaaaagcatgatgagcaagtcttggtgtggagctgagcctttatcacccactgctatgaaggaggcagaataaggtggtgcaggtcaggcccacttggcactctgcctcacctctccccttgtcagctccatgaggagccaagcttacgtctccgccacatttaaataagatggtatatgtcagccatctgactacattttgcctaatgtttgtggggtagtggtaaagtaagcatgcacgctcactcagagccaacaaggtggtatgagtcagtgctgtgctttttccagaacagtattggtggagctcagcggtaagttcaacataaatacctatgcagctgtgatgccacacctcaactggtgtactgcaaacttaaaaacataaagtacaatccacaatgtgatgtatatatttgttatgtaacataatcgtaaatactcactaaaggaaattctcaaaatagaaagattaattggaaaaaggcttgaaccatagcaaggaaaataaggagatatgggttctggacaagctggtacagagcagtgttttcctatcctccctcaagaaataacctatgaatccttgaaataatgtgagtgacaaccaaaggagcactctgtcaggcaggcagaggaaggaaaagtggtctgagaccacgtaattggaggaaaagcaatcaaagggcatcataagctttccccaaaacccaaagaggagaaagtgagccagactggcatttcctgtttctcaagttagcagcagaagccagccaggcaatcttgttcttccctgagatcaaggagaactccatctgaccataccaggcaagcctgaatcactggcaagtgggatcagccaaaaactctaccaacaataaaccaataggaaaaatgttgtcttctgttgtcaagtttgaaatctctgtctttggtcagagacactggggtggctgagataatacaatagggatcctgacatagcaaatgcctagcccaggaaatacttcctaccctgcacaaacagatgaggacactatcacaacaagcacctcccaggaaacctcttcatccacacgccttgagattattctcccccatgaagagacataaggtggcctgttcttgggccaggtctgtcatcagattaaattagacctgtgtcagcccagatcaacctcagtggtatgaaatcaaccaaatagaccaaaataatatctcagaaaatttaagaacaaaactatcatttaaactacatccccatccccacccctgcaaataggctgggatctgcctgataaacctactaaggggactgtctcttacgttaaaagattttaatagaatctagagcctcttaacataatagacaaaatgtgtgggatgcatttaaaaatcactcaacatactaagagccaagaatatcccaatgagaatgaaaaaatatgctatctcagcaaagaaataaaagttataaataataacatcagaatggataaaatatgttagactcattcttgtgagtttctcaaattttttgtttatttaaacaaataatataacataatctgtagttgtgtcattatatatagatgaaatacttgagataattataataaccaggagagaaaagggacctaattcaagtaagtattctataatttacatgtggtaaaatttcaataactgtgataacttacgcatgtgtattgtaatagttgaaacaccctctaaaaaactattcagtgatatagtaaaacaacaaaaacagcaaactttaaatacatcgagataaaattctaaaaacagttgaagtgacacataggaaggtttaaaaaaaataaaaagaggtactagaagtggaccaaataaaaaacaaataataaaatggcacacttaagccctaacatgttaatgggtactttaaatgtcatagcttaaaatacactagttcaaagacagaatagcagagtggaaaaaaaaatattccaagtatatgctgtctacaagaaaataaatacaaacacaatgacatagaaaaagctgacagtaaaagggcagaaaatgatataccatgcccacattagctttgaagagaatcaggaattgccaaataaatatcacataaattagatttcagaacaaacttactagagacaaaagtcatgttacatcatgataagatgaacaattcatcacgaagatataacactcctaaatgtttatacaacaacaacaaaaaaccacaaaacacgttttaaatcactttaagcaaaaacagatggaaatgaaaggagacatagactaatttgcaattataattgcggacatcaacactcctctctcagcaattgatagacctactagacagagaatcagcaagaatagagaagatttgaacaccacaatcaacagaatctgattgacatggaacactccatccaacattaccaaaattactattttgtaagcacccataggaaatgaagataaactatatcctcagtcaaaaaaacaaaacacaacaaaacaaaaaaaccttggccgggtgccgtggctcacgcctgtaatcccagcactttgggagacagaggtgggcggatcatgaggtcaagagattgaaaccatcctggtcaacgtggtgaaaccctgtctctactgaaaatacaaaaattagctgggcgtggtagcatgagcctatagtcccagctactcgggaggctgaggcagaagaatcacttgaacccgggaggcggaggttgcagtgagccgagatcgcgccactacactccagtctggcgacagagcaagactctgtctcaaaaacaaacaaaacaaacaaacaaacaaacaaaaaacacctaaaaacaaacaaactgaaacccttaacagatttaaaagaattgaaatcaggcagactttatattttctgatcacagtttattcaaacttgaaaccaataacagaaaaacagaaagataatttctcaacattggacattaacaacacgtttctcaataatataatggtcaaagagaaaatttatacaaaaataatatataaaactgaaggaaaatgaaaataaatcatcaaatatgtgggaagcttctaaagtaatactgacagggaaatttatagcactcagtgcttacattagaaaagggagaacatttcaaattaataatctgatttcctagctcaagaaaatagaataagccaatcaaaatccacttaaagcaggtgagagaaagaagtaagaaacatcaaagcaaaaatcaatgacatggaaaacagaaagatatagagaaaatcaactgaagataataaatgtggcaaaaatctgtttagaatggttaccaacagcttttgcagaagtatagcccttgagcatcctgaccaaaaactcacacattgtccttaagcctgagagcccagaatttgtcagggccagataaaacagtgttgttcacatttggcttgaggaatatgggaaactgaatccttcataggcaaaataatagaaaaggcagaagggagctttggcgagtaaaggcaaccagggctcagagtgtttttcttcctcacacttaccatgaaagttaaataaacaacaaaagtctcaacacattgatctgcagaggtttactgcctactcctcaggctatcatgaatataattttcttcacattataattttatgggattattaaatggtaaatatggtggcaacagggaaggaaataagccaaatttactatttagcaataggattcttaagctcagcatgtagatttataattaattgcaaaacagttaaaatcattgccctctccacttgttttagcatcatatttttttaatgttttattttaaggcatttctcaatttagtactgtaagtgaacatcttggttcagcatttagagtggaattatttttttgatgtttattagcaatgtagagcaaataaattttattacatgcatgttctcagtgattaaataaaatagaaaatgcaaactatgtaattttatacacgtaatgcattttttctcaatttgtgtttcacttcaaaaatatagtattaaaagagagtggacataattaaccaggtatgggatattaatatatgcctttaatagggataacagctttcctagagtgggatgattacttttataacccaattaaaatttaagagttagtgtcccttcattacttagattgcattttcttttagaatccagaagtttcatatattttgctttaaggcttatgcatgtgaagtgcacatttaaaaaatggaggcatagtactagtgaattaatttccatgttatcagataaaattaaacattgtcttttgatttattttaaccctataaaagtgtattatatctctgctcattgtttgctttttaaaagggagaggggaaatagttacatgaccaaagccatgtctatgtaagaacagatttatcagccaaactgggtgaactaaaactgtgtttgtcaaaatttcctttatttactaagcaagattttgtagcttggcagggagtcaaggaactgtgccattttttacgagtcataaatatcaaaattactcaatttgtctttctggatgtggattaacctttaattatcaaccagttccattttatttctgaagagttaatttaaatattaatgtttaaaaatacttattttggctcatttaacaattaaactgcattgtttcacaaaaaattaataggaattaatgactcaggccaaatatggataaaatgtcacttggaagcatgatgtcaagtagatgatagatatttgtaaaaaatcattgatcctagattttaagaaatatgtagttgtattactatgtattacatctctaatgataataatcataaaatacaaatttgaaatatccacctacacacatgctaacatatgccctaagcctacatagttgtgaaagaaatcaagataatattcagtttgaaatgagttttctctaaataagtggaaaacactcaaatattttaacacatttaaacttttaaaaggttctcttttaaatatctttacatacagtagcctgataaaaatgagatcttaattttttaagatgtagagggatgtattagaaaaaatgattgcagttcttcatttctccctctcttgttgccacttgcaaggctgctttaagctcttcccatcaggagttgtatctatttcaccatttctttagtgtaggttgtcctttgaatttggtttggtcaatggaatgcagaatttttccagttgctcataactctgcccctatatgcaaacacacctccccagactgctggtagatgagagagcatacagggaactaacaggccaagtttaaaatacggtctctcgctgtcccatagctaatatcagctacatgtggatgaattctactgagatctgaagatctagccagctgttccccaccttgattgctgattggcatgttcaggaacttaaaaaaaaagtgttttgttttaagcaactaaatttggagtggactatttcacagaatcagctaactgataaaattctctgcaagaaattttaaagtttacattttgacatgttactttcaatattaccttaaaataacataaacattctgaaacatcatgtgaagcacatcagactgaatatttcaaaaaaatactacaatataaattgttgataagcttgcaaattgttttagaaaatgtaaactttttgactaaaaacacaaactagtttgaattcattctttagatatataagctttctgcgttcattctttttatctctactgcatcatattttatttcttaatatttcaggatttaaaataatatcatcaattatgttcttacatttttaaaatttattttggaaaccacgatttaatgaccaagtttttgttgttattgttgtgcttctctgtttctattttgtacacacacaatccacatgactctctgtcatgacactataagcctcctccctaatttggttcctctaaatataacttttcttttttgataatcgttttatttatactacaaggttttcttatctcgcatgtgatgattatctattaaaaagaattaattactgatgtgagacatcaaaataataataaattacttcattataaaaagagtgatatgtataagtaaaatcagttctacataatagaggtatataatcaacataacgagaacctagatcccaatgtgtttattaagttgtaagattcaaatccctgcaattgggaattcacattttagaagtgactataaaatgctcaacatatatatatatatatcctcatctaaatcttcactggaagatacattaattagctttgtaataataacaatttgttttgcttttgggatgcccatcgggttttaatttttacatccacaaacacggcttttcaaaattttctttttagaattacttattattcaatggaacttttttgttcacctacacacagctgtctagggactgccaagggcaataagctgagaatgtgcatttttatttgtactggcattactctctaaaatattgctgtgaatcacaggataaactcttctgtgacataccaaattagctttacagagaagactcactggtggcagtatatgaaataatagttcatttaatagactttttaaatacattcaatgttcacctagagatgtgtattacttactcacaaacattagcatccccaatacaaaatgtcttctcagcaaatacaaaagattacacccaaaataccaaaacatatgctttttatcatcatggttgttactttctgatttaggttcagccttctctagaggctattaaaggaagcatacatttttgctgacattttatcatggcaataaaatgagatgggaatctatactcaaaagaccactaaaatcagtcagcatgtttactgcagaaaacaagttgccaaacactctcggataattcagtaaaatatgaccagatttatggatgagtgtattttcgcacaacactctgaagttgtagcatattttataatatatgtctatgatatccatgaaagataccctcagtgaatatattattcttctaatatgcttacactaatgtgtgataaattattcccagaaggtcaagagaaattgaatttatttttaaatttttacttatcaaatcacacaaaaacccacacatataaaacaatgtacttgattacatgcttcctgtttataaatcacatgtttttattagtaagactcattatacctgtcaatgttagtgtggactctcatatgaccacttttataagttcctggaaacaatacttttgatcctatgtaactaaaaccatccacagtagacaaaaatatcactttgaaacacagattcataaaaaaatagtatattgtggacagagctaaaatagatatgtagcaggagcactgtacaagttttagccaagtgtgaactataaaataatactaattaaagtgctgttactgcaattgattataattttttacaagtattctgaagaacaggagaaaataaaggcaatctgaaaaggaaaaataatctatgttatcattaatcgccgtatttatacagtgcattccttatagcaaatgtcgaacacagcgctgcacaacctaataggacaattacctgtgtcttcaagactcccttattggcagtctacgtagtcaaattgaatcatgatgttgtttattgaatgcctactatagaaaaacagtaacctagattaaagtagctcacttccttgtgatgatggaaatagacatgatgagattaaaaaaaaaattggggccaggtgcggtggcttacacctgtaatcctagcactttgggaggccgaggcaggtggatcacctgaggtcaggagtttgagaccagcctggccaacatagtgtaacgacatgtctacttaaaatacaaaaaaaaattagccgggtatgtggcgtgcacctgtaatctcagctaccctagaggctgaggcaggagaatcactggaatgtgggagacagaggctgcagtgagccgagatcacgccactgcactccagcctgggtgacagagcaagaccccatctcaaaaaaaaaaaaaaaaatgtacacaagctaaggtgtttttgttgctgttgttgcttttaattttttagcaaaaagaaaaaaaaactcagctgtagtagcgtgagtactgaaacaaatcattttgtgaatagtacagaacatgctgataaccaatgcatcatgtcaaaaatgtagaattaggttcagatgaagagtggagatgaaatgattttcaattgtaataggaacatggatgtatgtctcaaggtcctatgtcttaccttgtactcaaatccttacttggttggattatacacacccccttaaactctgttgtaatctaatttgaatttattgataattatttctttttctaatcacacacatgtgcacgtgcacacacacacacacacacacacacacacacacacacgcacataaacaggatcaccagggatactcctggagaaaaaccatgaagaggaacaaagtatggaagaggaaatgtgaatcctctactttcttacctggaaaggaggcagccacttttttggaatgatataattaggctttgtgtccccacccaaatctcatcttgaattgatttcccgtaatccccatatgtcaagggagagaccaggtggaggtaactgaatcatgacagcagtttccccagtgctgttctcgtgatagcaagtgagttctcaggaaatctggtggttttataggggctcttcccccttcactcagcactccttcttcctaccaccttgtacagaatgtgccttgcctctccttcctcttctaccatgattgtaagtttcctgaggtctttcccagccatacggaacgatgagtcaattaaactattttcctttataaattacccagtcttgggccatttttataacagtgtgaaacagacgtatacatgggacatccattccatctctaattccttaacaataaaattacatatactgtacaactttcattctttcagcattttagggttatttactctacagtatgtaagaagatagtttgaatatttttctataatgattgaaaggaatatatttcacttaatcttgtttttagttcttattttaaaatgttttccttagattttgtttttgtttgctagtttttgagaagaatcataggttaattattttcagtcttttttctttcctaacatacatattaggggtataaatgtcctctgaacatggtttgagatacatctcataggtgtttaatattaaatctttaattattattcagctcaaaccattctctattttaaattttttttattatattttaatgtaagttaaacacacatgtgtgtgtgatttcaacttaattgtactgtggtcagggaacatactttagaaatttattttaagacctaaactctttttgttaaattgcaaatgatatacaaacttatacaaatatatacttcacagattagaagtgcataaaaattgtaagtatccgaaaagactggttccatgttgacttccagaagtatctccaactgaaagttaactattgacttccatcagcctgagttttcctgtaattgaactttaaagactgagaatctacaatggcactctttttttatgtctgacttcccatgctaaaatttgtatttattagttttatccaaattggggttcatagtttcttcatttcattgctttatactatttcattttatgaatatagtatatctataggcatttattttattttctggtactgaatattactgacaatactgctttaatattcttaaacatttgtatggtccatttaagtatacattgctgttgggcatatacccatgagtgaaataactgaactataacgtatccaaatgatgaacataaatagacaaacgattttcaattttggtcaactttagactccaaactatattgcaagtgtattccagtttctctgcatgtttgcctaaacataatatattcatttaattattttgtacaagtttagccaattttatgttatagtatcacaaagtggtttaaacttgtattttcctggtgtccgataatgtacacctttgtgtaagtttgattactggatagcatcttttattaagaatctattcaaatatattgcccattttttgttgagttgtttaataattgtctttgtcatatacagaaattatttatatatgacacaatgaaaatatgttgttctatactaagggttgccttttcattgatactatgttgtattttaattaacataaattcatcattttaatatggtcaaattcacaaatctttattttatatttggtactttctgcttttatcttaaaactatgttgttatattatatgggtatataaatctttaagctattctgtatatttataattttatattttacatttaagtctcaaatgcatttggaattgattttttgtatgatttgaaatatggatccacatattttcatgtggatttccaatgaacccaacttattgaatcaacaccgcttattgaaaataaaataccaatgcaggttaacagcacttggttataaatcatataactatatgagtcagtgtttctcaagatacattattcttttttattgatatatttttccacatttatgttaatattacattaaatattgattgctttaatgtaacttggtacatgatataaaagctctatttatgttttttcatattgtgttgccatttcttgcatttttgccttttcatataaacctcagaagcaacttctcattttttacactgatatacatacaacccatgcttacacataaacacatatacacttctgagatttttcatggaattgtttttaacttgtagatcaattgaccaaaaactgatatatttaaaatgctaaatattccatttaggaacaagatacgtctttcagtttacttagactttcctttttttttcttttgtagagaatggtacttagattgtccttaaattatctcggaatattttattttgttatatatgtcttccatgtttttcattagcattattcctaatatttttgatgggtcttttttttttggtgcttttgttagcagtttcattgaggtttaaagtctattttattgcctccggtacatggaggcttatcatcttttacattgaatttgtatctagagaacttgctaaattaacttattaatcctctcattttatcttttgatgcttttgaattttttcactgtatatattatgtgccaattacaacaattatttcttcttcatttccaaatcttattacttttttgtttgtttactgaactggctagaaacattaacagaagttgaagagaagtagtgttttgattctgaacttgttttgcttccaatcttagcagaaaatgccattctgaacattttggatatgttggtttaatgttttttttaaatcaagttaagaacattattgattctccattgagattatcatatttcttctttattacattgatatactgatatgcatttattgcttttgaaagttaaacctttttaaaatcctagcataaactcagttcatctttgatatatttttctgtgtaagtaaatttaattggcttttgtttggcttagcatatgtttttatatatattattgagagatgacagcctatactattctcttatagaaagtctttgtcagaatttagacaagaatattctaaggcaatagaataattcgagatgtgatttcatgacagattctctagcactggaacccatatatttcagggaatcaggaattctctaagaataagggctgaagaacaaatggaagcaagtatgtcatcacaactgaaggctatatccaggctgttgtcacaaggaagctctggagtgcatactgtaccacagaggaaagaattctagcaatttcatggagaagagggcagctgcaaatttcattagccaggaatcactgaagttggtgaatgtctatgccagttgctagaggaaactctgatgagttattgcacccaacacagtccgcacttaaaccacaaagattcaattgtttctcccatttgttatactccatctaggctctgccttaccaagattccattttattacaattttcagaaaaattacaaaggatggcttaatgggacaaaccttaattcctgttgcttcacttggtcctgaattcataactgatcatcacaatctccactttccattctccatactttagtttcccccctttcagctaagctttatgctgatcaaaagtggcttgtcatattgtttgactcaggacatcatatctgaaatcctacttgccatattctcatcagaccttatttgttgtacttgctcatttgcagatgggaatgggcatgggaataccaaaagttgttctgaagtgttgcgatatatttctctttctattatataacaaatgacctaactacatgtagtgattagggccagttatctttgccaatatgctaactcctcagttcttgcttgtttggtggcatgaatcacccgaagtcatcaggtagcagatacatctttaagttttttcatgtataatttctgatcttgctattcattgttttggacatggatgtatttaaatatgatacagcaatccccttttcttcatggttgcacttcaactatttcaattacctgcagtcaactatgggctgagaagattaaatgaaaaatttcagaaataaacaattaatacattttaaattgtgtatcattttgagtagcttgatgaaatcttgtgccctgttgcaccatctcatttgggacatgaactgtccttttgtccagagtatccatactacctgcctgttagtcgtttagtaactgttatcattatccgattgattttcctggtatcacatcacttaagtttaagtagctcttatgttacttagtaatgactgcaaaacacgagttgtgatgcgggcaatttggatacaacaaaaagaagccattaagtttgttcgttagttaacaggtgaaagctctcaagttattaaggataaaaatgctagtatatatatatatggtttggaactatactgcggattttggatcatatccgccatggataagggaggaatactataatcaggtttgttttaaattccatgtctaatgacttcgttatctagatcacctgtagagctgtttttattgtaggagttttccttggttttaatcttttgatttgtttttcatgttaatactgaaatttttaaaaattgcatattgtacttcctatatgaaaattttactatgtatttttatttttattttccttttcctttaggaagaattagtttgttccctgacagagttagagtaagggcaaattacttgtctctataaacaactcagatgttttgagccggtgttgtaggggttatctttttctggttttgcattttattataggacatagtgcttaataagtctaaactgaatgcatgatttttttgctgtcatttctcctcatctgtccagcagtctaattttacctctgctgcaaagtaagattattgaaagcttttagctttttagtcacttagcaatagctttctgattgacttcttggatcctcatccccatgctttgtagaatttaccaatggcctagagtagtaaagcactcgaaattctaagaacgcttccctgggtcattcttctcctccaggactcctagccttcacattctgggtgtgctattacttctgaaaacaaatatttacctcctcccataatcatatctcaaactcaaagtttctgctttccactaagcctttatgccttatcctgagatttagggaaagcaatgtccaacataaaagagcagtataatctggccccctgcaatttgtttatgttctctctatcatcttgtagcctcaagttctatttacttggtgctctttgatactcagtaccagatgcttttggcacttcttcagttttatgaatgtgtttttctgactcatgttactcaatggtaaccagttgggcaataccactttataagatttcaatgcaatgaagtcctttggaacttaatgggtcaaaataggacttttttgggtgagtatttgaataaacaagactatttctataattactataagctggttttcacataattaaatcctggattcttcccacatattagtctagtagaattagactttatctcattaattatcattttaacattacatatcacgttagagtatataaatacataattggaagtttcatttaaacagcaaactctaggctgctataatattaatttttttaagaaacagaaagtaatcaaaaagtaaatcttttgctttacatcgctattatgggtagaattatgtgctcctcaaaagttgtttaagtacccccaaaggattataaataattctactagaatgacacatgcacacatatgtttattgcagcactatttacaatagcaaagacttggaaccaacccaaatgcccatcaataatagactggataaagaaaatgtggcacatatgcaccatggaatactatgcagccataaaaaggaatgacttcatgtcctttccaagaacgtggatgaagctggaaaccatcattctcagcgaactagcacaggaacagaaaaccaaacactgcctattctcactcgtaagtgggagttgaacaatgagaacacatggacacaggaaggggaacatcacacactggggcctgtcagggagtgggggttaaggggagtgatagcattaggacaaatacccaattcatgcggggcttaaaacctagatgattgttgatgggtgcagccaatcaccgtggcacatgtatacctatgtaacaaatctgcacattctgcacatgtatcctagaagtgataagaacagatactacacttgatctcagccaaaaggccgagaattgataaagcatatatatatacttttgagtatctatctatctatctatctatctatctatctatctatctatccctcaatggaggggtcaatattttccagctatgtatatatagttgtttaaatcctaaccctaagtacctgtgaatgtgaccttactggggaataggatctttgcaatgagcaacttaaaatgacgtcattagagtgggccctactttagtacgaatgatgtccttttataaaaagaaaatttagacacagagacaaacacaaatagaagaaaaatgatataaaacacagacagaaaaccatctagaagccaaggaatgcctcaaggcacacaaaacttggagggaggcatggaacagaatttccctggcagcccacagaaggaaccagtcctggccatgccttgattttgaaattcttgcctccagaactgtgactcaatttgtgtttaattcacccagtttatgatattatgttattacaggcccccaaaattaatattatagataaccacctggaagctgtaatctctatacctaaacccaagacagactattacaaatctctggacctcttcccttcaggattcatgaaaagtaaatcattaattggtctatgtatcagcttacaagtacaggttttttagtagtttatgataaaatactggagctttaagtttatgtctttaaaacatggaaacaaatataggaagtactaagagagttaagaacttttaaatgttaaggggctttgaagaagtttgtagaaatagaaataacatatcattagaagtatataaatataatataaatatattaattagagctagaagtaagattagtagactagccttctttatcaaccaaaaaataaaagttctattcttttcatgaagacataacaaaatattctttttgattattttattttttttagtttcttagcatattaaaatgtatttatatattagccatcctctataatctcatgtgtggatatatttaaggagattttttaacccagacttaatataatataatttattttattctagtattattttagctttgttttttatatacaaatatttggtctatgcattttattttaatgtgaagaactgcatagttttctgaaaatgtttacaaatgctataactactatctcagagcactctttacatttgagatttctcaatggaggggtcaatattttcctaacacaggtgagaaaaaaagaatgagtatcatcaaataaatttccatgttcatgtagattttatggcagatattagactcaaatgcagtactagatggctccaaactacacagtaatctcaagtttggtacagtagaaagaattagtgttaaaatatctccttagctttccaagaaagtcaggctgaccatatgattttgcaagccatcagattatcagttattttggcattaaattatgtttccagttatgcatatgtaacttccaaggtccttgacattaggagttaaattataactgctataaataaataatatgaaacaaatgcttttcattttccaattaaatttgaatatataataaggatttcaagtaccagtgattttaataactgattaaatttatctccctgttagaagaaaccactatacccattcattatatcccaatttcctttgaacatgtctagatggtcaagatgatttagccagaggaaaaaacaattaataaatattttgggcaaaataaaaaaacaaaccccccacagcaatgtgatgatgccccagagataaggattcaagaagaatttagggcaggcaagaatggcaggtctgggagtcagatgcaggggttatttaatgcaaagctgaaagagttacagaggccatagaatttaaatctatgtcggccatgcacagtgctgaccattgtgaggggcacataatattttgtcattgtagacgaaaaggataagtcgtaatttgcttagctgatgtgatgccacactggatcattacaaggtctttaattttcagctattaaaaagcactggatcttctgcaatcttgttacatttgctggaagttgaaacattgaataatattctaatttatttcttattaattgtgtccccagtttgaatatgtagtttataagactctcaaaattacaaacagtgttgcatatgtgtctctgcaaactacttgatagtttccaaggtatatatgtgtgtgtgtgtatgtgtgtgtgtgtatatgtgagtgtatatatatgtgtatatatgtatatatgtgtgtatatatgtatatatgtgtgtatatatgtgtgtatacacgtatgtatacatatgtatacatatgtgtgtatacacgtatgtatacatatgtatatatacacatatatatgtatacatatgtatatatacacatatatatgtatacatatgcatatatgtgtgtatatgtatatatacacatatatatgtatacatatgcatatatgtgtgtatatgtatatatacgtatatatatgtatacacacacacacacacacacacacacacatatatacacacagagacactttttttgttttttttttgagacagagtctaactccattgcccaggctggagtgcagtggcacgatctcggctcactgcaacctctacctcccgggttcaagtgactctcctgcctcagcctcctgagtagctgggactacaggcacatgccaccacgcccggctaatttttgtattttcattagagatggggtttcaccatgttggtcaggctggtctcgaacttctgacctcgtgatctgcctgcctcagcctcccaaagtgctacgattacaggcatgagccaccatgccaggctgaataaagttacatttctgtgagaaaattgttttactttacaactttcatcaaaattatatgaataatcttgttcataaaatctatattacaatttgattttcaaaatgtgtttgggccatgaagtatttatttttgcttttgtgacttgatggtttatcacatctttctagtcatatcaagttactttttctatatgtttgttagcattcttaccatagaaagcacattaattggcagtttatcacatacataaaaatattcttttgatttttttagtctcttagaatattaaaatatatttatacattaagcatccttctataatctcatgtttggatgttacattttagcaggtttagttaacccagactttacgtaatgtaatttattttatccaaatactattatagctttgttacttatatgcaaatatttgatccttctgtgcattttgttacaatgtgatgaattctatagttctctgaaaatttttacatatgcaatagctactatattagaggacttatttataatgcctttaactcctagtaactgatatatcattatcttcattatcacaaaatattcaggagttggtcttttgataaaaacaaatttctggtcatctttctgcccaatagataatacatttttttccttaatcatattttgttgtttctaaattttcactagacaatgtacactacatggaataataactaaattaattaagaaaacagtgtattagtttgttttcaggctgctgataaagacatacctaagagtgggtaatttataaagaaaaagaggtttcatggtctcacagttttacgtggttggggaggcctcacgatcatggcagaagagaaaaacacatcttacatggtggcatacaagagagaatgagagccaagcaaaaggggaaaccccttataaaaccatcaggtctcatgagacttagtcactaccacaagaacagtatgggggaagccacccatacgattcaattatctcccacctggttcctccctcaacacatgggaattatgggagctacaattcaagatgagatttgggtggggacatagccaaaccatatcaagcagtattaacagaatgagagataaaagagatacacaaaccatgaaaaaagcaccctgcagcacataaacttatacgtgtatgtttttgtgtttatcatcccttctaaattgtatactctttaagtgttgaaatgttgtctttttcaatattgtagttcgagcatataagataatgcttggtacataatatgaacctaataaacatttattgaataaaataatttaaaaatatttaaataaatttatgaacattacaaataacaggcagtgaaggaaagagagattacagggaagaagctgtataattctaataataacataaatatcagtaactgaataccttttaagcacgacgacctatagtttgcattttacctactgagttccttcaaagtgcaatgcatgtgcttttcattttaaataatatatacatagaattcatattttttatgtatttatcacaacattaatatttattatcatcttcaatgcacagttgctaaaactaccacttgaaaaaaaaagcttgttaagattaaatgattagtaaatggtaatcatttactaatcataaaattaagtttatattttcaaatcctctatagctaatttaccctgaatatctcaatatgcaatttaaattgttgggcaaaacccaacttatcccactagtctacttccaatgagaaaaaaaaaaaaacaattatttagccattcatgacacctaaatcatcagcaaactagtgatgtgtgataaataattatttgtgagtggattatgaagtcaaactggctttggttccatttcttttctcccatgctgtgggctaattcaagtagtatattcttttttcatttttgccacaaacaattgttccaaactgaatggattacaagaacaaaagagtattatcctataattttgttggttggaaatatgatcccagtctcactgagctaaaattaaggcatgggtagggctgccttattatctagcagctacagagaataatctgtttctttgtctttttcactttctagagacaacttgtattccttggttcattactccattcctttatctttaaagccattaatgacaaggtgattccatttcattctgtcatctttctggttctccgcagctaggaaagctattcatgtaactcatagcttgacataactttctttccttgcccagtaataaaagttaatgcctgcatggacatcattggcaatatgcagaaaaggtgcatgacaagtctttattcatggaagttaagcagttaaatccattgcttagatctggagaaatttttaagttggcgcttatacctgataataaaacattttagtttggggaaaatatggctttttcttggttagaacctaccataaaagaagaataatcatgatcagatgaacataaaaagaagttattggttggtggtgctcactgctggaaataataagcaatatctgtccaaggctatgaagtagagaaatgaggagacgttcgttcaacaaggctgcaacagccactcaaagaattcttttgttcgtagcagcagatgggaacgcacacagtcctgagtgcataagcaatgtttatttggggcgattagaatacttggtggcagttagagagatacttttatatgtactggaattcccttttgggcaaatgaggtcaattagaataatttaagttacagtcaaacatggagtatgaaatgtaatctattacactgagggggaataggttagatgcttccaaatgtgcagggattttttttttcataatgatcagactcaggtttagcatggatattctgtacattaaatatgcttggaaaatcctgccatagtgaccagagttattgctgagtaaatgcatatggggagatttatttgacacctttaagtcctgaaactcaaatgatattatcacggaagtagaggatgaagagtagacagattatctgagccatacaaatgacaaaacacagcatcccttaggtcgtcatgcaaaagtaatgatatggtttggctgtgttgccatccaaatctcatctcgaattgtagctcccataatttccacctgttggaagaggaacctggtgggagataattgaatcatggggatggtttcccccatactgttcttgtggtagttaataagtctcacaagatctgatggttttataaggggtttccccttttgcttgactctcattctctcttgtctgctgccatgctaggtcgtgcctttcgccttctgccatgatcatgaggcctccccatctacatggaactgtgagcctattaaacctctttttctttaaaaatgacccagtctcaggtatgtctttatcagcagcatgaaaatggactaatagagtaaattggtacagttagagtggagtgctgttgtaaagatgcttgaaaatgtggaagtgactttggaattgtgtaacaggcagaggttcaaacagtttgcacagctcagaagaaaaacaggaaaatgtgaaaaagtttggaacttcttagtctcgttgaatggctttgatcaaaatgctgataatgatatggacaataaaatccaggttgaggtggtctcagatggatataaggaacttgttgggaactggagtaaagatgactcttgctatattttagcagagactggcagcattttgcccctgtcctagagatttgtggaactttgaacttgagggagatgatttagggtatctgggagaagaaatttctaagcagcaaaacactcaagaggtgacttcagagttattaaaagcattcagttttaaaggggaaataaagcataaatgttcagaaatttgcagtctgataatgtgatataaaagaaaaatccattttcagaggagaaattcaagctggctgaagaaatttacgtaagtaacaaggagccaaatgttaatcaccaggacaatggtggaaacgtcttcagggcatgacagagagctttgctgcagcccctcctatcacaggcccagaggcctaggaggaaaaaaaaaatggtttccttggccaggcccacggtcccactgctgtgtacagcctcaggatataggaccctgtatcccatctgcttcagctccagccatttctaaaatgggccaaggtacagctcaggctgttgcttcagagggtgcaagccccaaaccttgccaggttccatgtggtgttgagcctgtgggtgcacagaagtcaagaattgaggattgggaaccaccatctaaatctctgaggatattggaaaaagctggatgtccaggcagaagtttgctctaggggtgttgtcctcatggagaacctctgctagagcattgcagaagggaaatgtgggtttcaagcccccacacagagtccccactggggcattgcctagtggagccatgagaagaggaccctcatcatccagaccccagaatggtaggtagatccccagcttgcaccgtgcacctggaaaagccatagacactcaacaccagcctttgagagcagccaagagggaggctgtacactacaaagtcacagggctggagctgctctagatcctgggaacccatcccttgtatcagtgtgacctggatataagacatggagtcaaagaagattattttggaactttaagatttgactgccctgctggattttggactttcatgggacctgtatctccttcattttggccaatttctctcatttggaatggctgtatttacccaatgcctgtaccccagttgtatctaggaagtaactaacttgcttttgattttacaagctcataggcaaaagggacttgccttgtctcagatgagattttggagtatagacttttgagttaatgctgaaatgagttaagactttgggggactgttgggaaggaatgattggttttgaaatgtaagaccatgagatttgggaggggccggggtggaatgatatggtttggctgtgtcctgacccatatcccatcttaaattatcttgaattgtagctctcacaattcccacatgcaatgggagggacccagtgggagatagtggaatcatggcagtaatttcaaccttactgttctcagggtagtgaataaatctcatgagatctgatggttctgtaaggaatttccccttttacttagctctcattttctcttgtctgccaccatgtaagatgtgcctttcaccttctggcatgattgtgagcctccccgcctagtggaactgtgagtccaataaacctctttttctttataaattacccagtttcatgtatgtctttatcagcaatgtaaatttgcaaaaggaacctcatagatttgatcttctcagtagaggtccatgggctttataattaaagacttagagaaatacttgcaaaacatatacttgataagatatgggtattcaaaatatacaaagaactcctaaaaggcaaacagtaagaaagcaaacaacctaagtaaaattgggcaacagatttgaacagacacctcatgaaagaagatatatagattgtaaataagcatatgaaaagatgctcaacatcatgtgttattagggaattgcaaattaaaatggcaatgagattccacaatacacatactagaatagcaaaaatcccaatgtcaatgtcagatgttgataagaatgtggaagaataggaattctcattcattgttagtgaaaatgcaaaatgctacagccagtttaaagacagtttgacagtttttgacaaaactaaacatactctgactatagcacccaataatcattttccttcaaatttagtaaaactatcagaaaacctattttcacaaaatacctgcacataaatattaataacagtttcatacaaaattgttaaagtttgaagctatagatattcttcagtaaatgagttggataaacagtggcctattcacaccatggaaccttattcagcaataaaaataaatgagctatcaagtcattaaaaggcatagcttaccatggctcatgcctgtaaactcagcactgtgggaggccaaggcgggtggatcacctgaactctggagtttgagacaagcctggccaacatgatgaaaccctgtctccactaaaaatacaaaaattagctgggcgtggtggtggatgcctataatcccagctactcaggaggctggggccagagaatcacttgaacccaggaggtagaggttgcagtgagccgagatggcaccattgcactccagcctgggtgacaagagcgaaactctgtctcaaaaaaaaaaaaaaaaaaaggcataggagaggcttaaatatatattgctaagtgaaagaagccaatccgaaaatgctacactggatgataccagctatatgacattcactataggacattctagaaaaggttaaactatgaagataataaaaatatcaatggttgccaggtgttcagagtgaggaagggagggatgaataagaggaaaaaaggagatttttaggggagtaagactattcttgatgacaatgtaatggtggacacatgccattattcatttgacagaactcatagaagatgcaacaaaaagagtgaagtgtaatgtaaactatggtttttaattgaaatgaagtagcaatattagcttatctgttgagtatgtactggactatgaatatgtactagactaattcaagatcttatgtttataataggagaaactgggggaagcttgaagatgtgtatgggaattctactttcttctactttctgttcaacttttctgtgaaacaaaagtactcaaattaagtttattaatttaaaaaagacaaagcattactataactatcagcatagttgaagagatatgtgtccttttaaaaattctttaatttttaatttttgtgtatccacatatatatgtatatgtatatatgtgtatgtgtatatatggggtataggacacattctgatacaggcataggatgcataataatcacatcagggtaaatggggtaaccagtaccttgaacatttatctttttttgtactataaacaatcctattataatcttttatttattttaaaatgtacaataaactattgatgactgcagtcatgctgttatgctatcaaatattagatgttattcattctatctaattatatttttgtactcgttaaccatcatcatttcctaccacccccaccactaggcttcccagcctctggtaaccattattctactctctatctctgtgagttcaattgttttacttttagctttcacaaatgagtgagaacacatgaagtttgtctttctgtgcctggcttattttacttaacatatgacttccagtccataggagatggatgtctttaaaattcatagcttaaacaaaagttatctgtaaagagtatctttgattttgaaaatgtttacatttatgacagtatatgtgatcataggttacaataaatgaaaaatattcataaaatactgggcaagaaaattttagcagatacaacatgatagcatacagagaggatcacgtgactaaaaaatggaagtggcaaaacttatcagtgctgtgtttgcttaaaaacattaaatgactttgacagaattttagctttattgcaatatcgtgttatttaatatttttttttttttggagacagagccttgctctgtcatccaggctggagtgcagtgccaaaatctcagctcgctgcaacctccacctcccaggttcaagtgattctcctgcctcagcctcctgagtaaatcccttctgggtttacaggcatgcgccaccatgcccgactaatttttgtattttcagtagagacggggtttcaccatgttggtcaggctggtcttgatctcctgacctcgtgatccgcccacctcggcctcccaaagtgctgggattacaggtatgagccaccataccttgcccttatttaataatctaaggtactggtatttttgtctcataacaataatcttattttattgtaaaataaattacataatatatgtgacaaattaatgtttttgtatttattcccttttcaccagcagttgatgcttcatatatttcagccatagtatctagaactcagtattgaatatgtgttcatccatcccttcaactccatattcaggagccatgtttgagtgctgtatctatctatagcatctatcacaataactgatgcagggtagatgtggaacaggaaatttgaaatctaaaactattgctgaaactttatttatttatttttaaaaagatgcaccatgaagttcaatatgtcatagaaacatagaatcttgtatagtaagaactttgactttttgaagtcctaggctgatcatgattctcctcagtaagcaacaacgttgacatccaggtaattaccgaagtctagaacaagaagatgagatggatgggaaagatgttagttaaatggtctatcctaggtaggataaataagaatctcagtctatttcatattatgcttgggtttttaattgaaaaataaacataaagtctctttttaaatttccttgaaatgcaacatttaattaaaaatatgcgaacctttataaatgttatttaattcatagactatgtttatgttagaaaatgggatttgttaacatgttacacattaatttcattaaccccattcatcatgatataaattgtttcagttgtttcctaaagagaaactcatatttgatgtctattttcttttatttttttcttttcaatggtataaaaaaagttacatagtgactttaccaattttaaattcaaaccgaatacaaattctggttacatcaacattaatgatcaattataattaattaaatgagaaaaatcaatgaatggtggccattagtaagccagtatcattttcagtgtctattttgaattttattccagttccaactgatatggttttagaagtaagtccttgatgactctatagatccttaactctgatgactttatttttcttagtaggaagaatatggcttataaagaactatgatttatactttaattgtaaattccacttgctctgtttatggcgttttattttgggtcaggatagttctctattccatgacctattaccatttagtttgtattgctggcaaacagtttcctatttataacacaaaactatttactccctggggagtgttgactctcagttaaattaaccaccgctaaagcaattaccattttaaggagccaaatcccttttgaacaattccaattatatttggaatcgagcaccacaggtttttaaacaattatgtacaacattgccatgtatccacagtctccaaaaaattaattgactaataaattaggtaattattcatttataatatttgataatgctgctttttccttaggaaaccatggcttcttaataaagactcttaaatgccagatggacatctgggagtgcctttatcttatattagccaactcattctgtaatatttaagtctctttccttaatactcaaaagcttatttcttaaccctatactccagtttatttttgactgactcccttggtgacttggccatagtaaaacttgaggtccttggtttgttaattcagctattgtctccatgatgtctttttactttgctttctatctcttcattactcctgcttaacatttgagtcaatgcactagtttttctgaaatataatccacagccatgcaatatatcaatgtgattatctctttcatatttcctttttcatgactgtatttctaattttcctgaagtacatccctactgttccattgaggggatagtgatggaagaattaaaatagatatctcaggacaaagtagaataaaattttaatatttgaatctaatatttaatataaatttgtaaatctacaattaaaaatgtgtttaagagttaggcctatctgcagagaaaaggtgtttaattttttttattctcctccttttgaaacatgtgattgaataaaccaggttatacagctatactaaaagtcagaagtcaggaaatcgataaactcaatagtgtctgcttgtttctaccgaatgataaaaagaattctggaaagaaagtaaaggcgtatttcaaggtttatgttttcttccttcaaaggcctaaccagcaatgatttccagaaaggataaaattttgcagagacaagagtgtagaaagacatggtagagaaatagcccaccgtggacccgagggttcaaccatgctctaggataacaagaaatagacagagattcaaaaaatgtagtgtctctagcacttgagggaccctgaggagcagtaagccctgcccatcttcagccatggagataaagaaaactaacactgtttgcaaacctgcttaccctagagaaaaggtatcactcagaaagcatatggaaagaatgctgcagttgattgtcccctcatcttcttctgcttggagggagagaataaggaaagacaagaggcccataaattcatcaaaggggttattctaaatgtcctaattttctgcccagagtaaaattacaaagcaattatgcaaaacttgcagtgcctctcttctgcagtttctttattttcccttttcattttctaaagtaaaagtttgaataccctttgagccgtcttattttctcagtgtttcacggcattaccgttgcctatgtgaatacacgatattatagacaatgattatattgatctcaatggcaataaagttttaaaaggtgaattttctaaaatgcaatggaatttagtttattaaaaagaactttcataatccatttctcatattatatatgtttgggacttgtggaaaatcacgtgttataattattcaaaaatatgtagcaaaatacacattgggattttgttggctatgtctataacattatcaacctttataatgttaaataagctcagctattcttagaaaaccatacaaaaatgtagagcttaatttgttaatacaagatgaatacctttgtaataacaacttgggacaaaaaatagaaaactctactctgcctagcagcccagaaggccttcatgtgcctcctccaatgtctgtccccttagtctctctaaaagtaacagctattctgaaattatggtaatcacttctcttgtttccacatggttttgtcatccaaatgtgcatctctgaacactatagcttagttttctttaaaaaacacgtgccaaggcacgtgaatcacctaaggtcagaagttctagaccagcctggccaacatggtaaaacactgtctgtactaaaaatacaaaatttagtcgggcaagtggtgggtgcctgtagtcccagctactcaggaggctcaggcaggagaattgcctaaaccctggaagcagaggttgcagtgagccaagatggcaccactgaaccccatcctgggtgagagaatgagactccatctcaaaaaaacaaaagtctcttaaagctgcagatctccatactttctttctcccttgaaggacagtggttgtttgatttgtttagactcacactgtcttgaatttgctgattgttcactcatagagcaatttgacatgttcctctgccctctgtattacctttaatctgtcagctggtcccagaagtttagtaaggttacaggtgatgttttctttctccaggagacacacatcaggagacacatatgagtgtgtgtgtgtgtgtgtgtgtgtttcgcttaaaaaaatattagcagctgttgtcagatagatcccgttatttacttgggttgtagagtaatatttgaagtcagtgtgcttttatttattggaggaaatagtcttataaagaagcagtttgattttccaggggtacattcatgtagagaaatagatttaatgtatggttatttcttattattgtttctattttaaaaacaaactgtttattctgatttcctcagaaggagacaagatatttttcaatcaccttaaaatcatggatttaaatgtacactatagatttaaatccatgatcatacttgtccttattgaagtgaatattgtctgtttttgtccagggagtctactatttgattggcacagaactacattgtcgttggtaactttcttattgcttgctgttttcagaagcaaaagaaactattttttttttcattttctgacccatacataaaggcaaatatttctccaagaagcctccattacataagtggaaaatagtatcgctagattacaatctggtctgggtgttaaggatgcatattgattccagacttggtcatttaggtctatttggtacacaaggcagaataaagggattattgcttgataggtaggtaggtaggtaggtaggtaggtagatagatagatagatagaagatagatagatagatagatagatagatagatagatagatagatgatagatgagacaagacaagacagactatgaataaattaatcatactgctgtttctaactcaaagattcaggacacatgcttttgacttaattcttccatgtagcatctataatattatatcaagtatcttctatctttacacattgcctcatttatcgttcatattccatctgaatttgtaccatattgtatgtctattatcttgttcttccacataaaaaatcctggttttcaaaagcacagaatatgaagaaaataaaatataattactgatgtgcttttttccacattacatatatagttttagattagttatattaattaatcacaattaattctcactgctgggaaaataaaatcttattttgaaggtgttgatgtccactgcttttattttcctttgttaagctcactagtttcctctggaatctgagttctattgagaggatcttgaacaattgttgagttatagcttgctctatgtcaaattaatatattcaactgaattttatagaattaattatctgaacactctagttttctaaagatgaaagaaaatttgatactttaaaatatttcttcacaaataaattttgaatttgttagaaaaaagacattaaggcttttcaccatggctcacagctgtaatcccagcactttgggaggccaaggcacgtgaatcacctaaggtcagaagttctagaccagcctggccaatatggtgaaacactgtctgtactaaaaatacaaaatttagttgggcaagtggtgggtgcctgtagtcccagctacttgacggctgaggcaggagaattgcttgaacccaggaagcagagtttgcagtgagccaagatggtgccactgaactccatcctgggtgggagagtgagactccatctcaaaaaaaaaaaaaaaaaagacattaatatattaatattaatgtaaagtttaactaaattatttttaaaatttgtagaaaagaatctagaatattcactaattaaagtaaaaattcatttaaacaatttccctaaatccaaatcctgtttaaattctagggaataatgattatataggtctgttcaaatttcaattttctacataggcatatacagtcttctctattttttaaatcatctactcgacaaatatcaatttaattaaggatttattatagacatatttataaagcaagtatagaaatttagtaaattaaatcagtaaatacttagcaattttatcggtgaattcgaaaatgcaccatcaagctaggcgcggtggctcaggcctgtaatcccaacattttgggaggccgaggcaggtggattgactgagctcaggaatttgagcatagcctgggcaacatggcgaaaccccatctctactaaaaatacaaaaatttagccaggcatggagcaccctgtaatcccatcaactcaggaggctgaggcaggagaatcgtttgaacccaggaggtagaggttgcagtgagctgagattgtgtcactgtactccagcctgggcaacaaagaaagattccatctcaaaaacaaacaaacaaacaaacaaaccaaaaaaaaaagtactatccgaaataaataaatattcacctactaccactgaaagatggcaccttaaaccaagaaacaaaaggagctacttggactgtaagtaaaacattgcacataaggcaggggtccccaacccctgggctgcagactggtatgggtttgtggcctgttaggtacctggctgcacagcaggaggtgagcagcaggtgagccagcattatggcccaagctccgcctcctgtcagatcagcaggatcactagattgtcataggagcacaaaccccattgtgaactgagcatgcgagggatctaggttgctagttccttatggcaatctaatgcctgatgatctgaggtgggacattttcatgctgaagccatccctccactccttctgtcccacggaaaaaactgtcttccatgaaaccagtatctggtaccaaaaaggttgaggaccactgacataagggatgtagaatagttcccagaccctctaaaagcttgtttttacatatgtacaaaacttcaggtcattcaatttctgaatcatttcttattttctccaagtcaatgattatgttcactctgtattttgtcagtatgttgacactcaccttcatgctgccttttaaaattgtgctactagtgtcctgagattctgcagttcactcatactgtctcatatgcataccttccattcttcattttacctttttcatttgttatccctgccatataaagagtagtaacattgtcaatcacataggtgatggtgttgtacatacaggaaatggttcaatcctggttcttgatgtgacaggacaataaacaaatccctggcacaactacggaatgtgattaattaaaaggaagtacagaaaaatagatgtaaaaaaagagctaatagttatttaaaatctgaaataagaatttaagacaaaaaatgatggccaaaaaaaaaaaaagaggaagcgcagtgattaacatctcaaaacagtagatactggaaagcctagggcacctggggttgccaaagaataagaagtatgaagtccgtttaagcaagacagtgctttcctttaaaaaacaaagtctgtgtttcagctataatttgaatgagacagaaacatgtattgttattgggtaaggagagatcaataatttgatgatgtttataacagttgactgagaagccgatgatataattttcccagaaccctttgttccaagtgattgaaattttgtcatatcctgtaacttgagctcctatctatcaccaagaggattctctttttgtgtcagtgtgattgaggtataatccctacacaatataattgaatgttttagcatattcagagagacatgaaatcatcacgacaatcaatttttaaatatttgtgaaacaatttaggaaatcactccgaaaggaatttcatgcccattatcatccccttatttcacaccaaatcttcttaacactaggccacaactaatttattttctttatctatagattgtctatactgcgcattttatataaatataatcttacagtctgtggtcttttgtgactatctttatttgcttagcattatgtttgcaaggttcattcataccatgtccattccacaactaatttactttctttatctataggttgtctatactgcatatttcacataaatataatcatacactctgtggtcttttgtgactatcttcattcacttagcgttctgtttgcaaagttcattcatacctcttcattcacagcatccatttgtaccatgttttggtacttgattcctatttattaccaagcaatattttatattttgacgaacttaaagactgttttacaaaatgtgttaactattttatatgagagtttcagtttctccacaatttcaccaacattttccatcttactgggtgtgaaattatagctcattgtggttttgatttgcatttttctgatgactaatgatgttcagcatctttttactttcttactggctatttgtataccttctttggagaaatggttattcagatttccttacctatttttacactgggttgcttctctttttcttattgaatatattatatattctacattaagtccctcatcagataaataatttttaaaaatattttgtactattctgtgagtggtctttatcctttctccttggtgtccattgaaacacattttcaggaaatttagatgaagtccaatttatttccttttcttgttgcttgcaattttggtgttccatctaagaaagttttaatcaaagttcataatttatttctgtattttcttataaaagcttgataacttaagttcttacatttaggcgtttatctattttaaggatttttaaaataaaagataaaaacgtagtccaacctgattcatttaaagtagatatccagtggccccagaacaatatgttaggcaaactcttctttcccccattcaactgtcttgccatcacttttgacaatagactccaaatgtgagggttaaataatgcacactcaattaaattccatttatagataggtctatcttatagctggttgcagtggctcatgcctgtaatcccagcactttaggaggctgaggcgggtggaacacctgaggtcaggggtttgagaccagcctagccaacatggggaaatcccatctctactaaaaatacaaaaattagctaggcatggtggcatacgactgtagtcccagctactcaggaggctgaggtatgagaatcaaattgctggaacccaggaggcagaggttgcagtgagccaagatcgtgccaatatactccaacctgggtaacagtgagactccatctcaaaaaaagatatgtctgtcttatgctagcaccacatagtcttgtttacagtagctttgcaggaagctttcaacattttttttcttttttttcaagattgttttggttatttagtgtctcttcaatttccacatatattttagaatcagcttgtcaatgtctacaaaaaaaaaaaaaaaaacgaagttggaattttgatagggtttactttgaagccacagagcaatttggggaccattgccattttaacaatgttaattcttacaatctatgctcatagaacgtttttctattaattagatttctacaatatctttcagatttttctgtagttctttttttttttttttttttttttgagacggagtctcgctctgtcgcccaggctggagtgcagtggcgggatctcggctcactgcaagctccgcctcccgggttcacgccattctcctgcctcagcctcccaagtagctgggactacaggcctacaggcgcccgccactacgcccggctaattttttgtatttttagtagagacggggtttcaccgttttagccgggatggtctcgatctcctgtagttcttgttgtaaagtttacacctaagtaattcaccccttttgatactcttgcaaattgaactgtttgctttattttatttttgcattgttcattgctattgtatagaaacaaaaaattgctttttatatattgatatttttgcacggatttcttaggattttctatgtacatgaccatgtcatctgcaaatgaaatagttttatttctttatcaatccggatgaatttattaaaattatcttgcctaatttcccaaatagggcctccatgttgaacataagtggtggcaagggtgatctgttgctaatctcagtggatgatattcagtgttttacaatgatcttcgacagctctggctgttaaattatcatagtctgtatggcctaaacaaacaaaatacttatgattatgggggaggctgggatatccaagatcaagttgctggcaggtctagcaacctgccactgggaagccctgcttcccagttttcagatggccaccttcttatagtatcttcaccaaagatagggcagagagagcaagcaagctctctaccttctcatataagggcactaatcccaccatgaaggcgccactgtcatgacctgattatgtcacaaagaccccggggcaaatattaccactgtgaggagtacagttttagcatgtgaattttggaagaacacaaacatttagtacagagtgactattaagtatgttattaactatggagtttttgtaggcattttttaacacattgagaaagtttcctctattcctacttttgttgagaagtttttatgatgacaaggcattacattttatccaatgacttttctgtgtgtattgagatgactgatttgttctgccaatttaaatccattgttgattctctctaggattttttttatttcagttattaaatttttcaacaggagaattactgtcttgttcttttttttgtaatttctgtccccttactggtattccatatttaataaggcatcataatagtactcttctttagtttcttaaagatggttttctttagtttttaacatatttatgtctatttagaagtctttgttaagtctgacatctgagctctctcaaagtttctgctgattttttttttcctatgtttggttcacactgttttgtttctatgtatgtcacaatttcttttcaaaactggacattttatatagcattatagcagctccatatactaaagtcccctttcctccaaatgcttgttttttcatatatttgtttaagtgacttgcctttattaatggtaaactctatttcctctactttgtggggttctggttcacccctcagaaaactcacccctgagcctatgaacagtgattctgagatgacagtgtttatggaagggctctctttgagcatctcttccctctataatgccgtctgcttctgatggtaccacagctggcaatttggcttcattcattgctggatggttgctgtatttttggaaaatgctctttttccttggtatgttctgtaaactagctggtctgcagcttattttactattttcccagagctaccagcctcctcttagttgctcacccccaaaatcaatatgatgtaatataaaggctcacattggggtataaagaaagccagttctttcggggagagcttttgagccttcccttatggtctgtctctcacatgacaccaaatatccaagccagttcttcatagctgtcagtggagacagttggctgcttttctgagtggcatcttactttataagcaggatacagtccagttatggtgacccctggtcttttcatcttgatcctcctagcatgaaacatgactttatcaatgagctagagcaagggcaattgaagttctattatttcctgcccatagaaactttttcctttgacagggactgcatagtgaaatggaaaccctggcctcttgatcacactttcctggagtttagtcccctctgcaatatgtacctgggagtcataagaaatgccagttacaaaaacttcctgtacagatatcctagcactcaactggaaaccggggagagtcacaattctgtctttccagccatatgtaactgaaatggagatcttttcaccctgagccaggggtgatgggaaagggagctggtcatggctcaatgtttagccttttcttggtcttcaagatttcatagacattcttaaatacatgtttctttcaatgaagtttgcccttaggacaattcacagctacattaggtactttttaaataatacttttgaccatccgtggttatttcattgaagaaaatctatagagcacctcagccatcattccagaagtgactatcctcctcagtaatggttcttattctaattttaaatatcattgatgtagaacattctatttcactattccttcattttattattatgggaaattatatacagttctccagatttttaaagccttgctaacatgttttaagtcacacaaatattcttctgtgggaaaatgacagtaatttagtgtgcaacaattatatagaactatttttcaaacttataaacgaagtgaaattctaaataaaatcatttatcaaacacaaaaatttgagccagaataaggaatgtaaattacaatttaaacacagattataaactatcttacttttaaaatgttaaaattcctaacttgtttgaaaaatttgtgcctgcctaatatttgagaataatgttaataatgtgattgacaagaactaaattccttgtaattactgaaaatgtgagaatacaccatggaatttaatcaatctctcctgcaaaaatttaacaaataaaatttcagtattaagtaatgaaaacaattgccttcttggtatgtggttcactaagaagttttgaccataactataaacaacaatatcacaggcataaaagttggagtcacttcaaagagattttcacaaaaaagtaactagaagcctgctaatgttttctatcaagcaggtttcttgagttgctaaaataaaagttaatgttatcattaaataaatatttataccataatatgtgttataaaaacttttgaatgaagtttctaaagcaaaatggtgcctaaataaatcagtgattgatgttaatgaacaaaagtaaaaatcgataacattgtaatgtataggaataaattaaattacagaagtaacctatttcagttgctacatgaattatgtaatacaatgttataataaataatctgtgctacatgctgtaacatgaatgccaatatcatatgttgatactcctcctcttctcaaagggcaatttttctgagacagaatagtcaggatctcatcactctcaagttaaataaaaaatgaaagggaagtctttagttctatttcatccaaatttgctttgctcatttttattttgggagattcatctatattttcgaatgtagaaaaagtttgtttattgtcttagtaaagaaattatacccctgtttttaactacatcatagtatatatttactaatttctactcttactgttatttctagctttgtgttatatatatttaattatatccacacaaacatatatatttaactacttctatttacataaatatttaatttgcattttctttacgactaacacaattgaacacattgtcatatgcttatgaaaaacttaggtagtcttgtaaattgactcttagagaaatttctcattgttaagttttctgtctttctatgtgttctggaaacaactccctttttagatatatgtattgaaattatcttctatcattctactggctgtattttactctatttatgatgtctttttatgaacatattcttaatttaaatgcagtcttatttatccattttccctcatagttagcactttttcagtctaattttaaaatatttgcttatgtcaacagcataaatatatttgcctgtatgtaattctaaacacgttatttgttttcttttcatatttaggtcaaaatctatctgaaattgattttatgcatgcagtaagctagaggttaacatgatttagttttctatgtaaatattctgttgatccaacagaatttattgaaatgtgtttttttttttcacccatagcatgtcagtgtcaaacatgttataaacctggaaacaattaatgtgtaagctatttctagagtctcccattcgtttattcatctattattgtaccaataacacattgtattagttgatatagctttattatatgtctcaacatcaggtagtttaaatcttgcaagttgttctttacacagattgctttggctatttgctctttgaaacttcatataaattatatatccacttgtcagttttgattaaactttctagaatatgattgggattgcaatggatacatatataactcagaggtgataaaatatatagttaagttctaaaggtattctaaataagagagggattatgacaactcataacagttgcttcttttataagtttgcctttatatcattgcatagggttttgcataactaacaagaacagaaagaacatcatcaaataaataagaccaacaaaggatgagaataatgaattcatgtcactaggaaaaatggcctgagtatcttaaatggatgttaagaaaactttattgagtggctttactgatatatcaataaaagagagaatactgaagcagggctggtttgagtcgggggggggatcaaatttttttaaataccagcagtaaaatgaataatacaacaaatatgcttagtcaggagaaatgtgatatgtaattacatatctaaattttcatctaaattttgtcacacattttgcagaaaagattttgaataaaaaattttatatttgtatttactcttcatttgcattggtgttagataatttgtaatttccactaagaagcctgtgtgtgtgcctagtacactagacacataaactatcatagatctctgcattgcaattatctgttaagtagtctgtatattttattatattctaacttttctttgggaaaaaaagttatactcattgtttcatccttagtgcttgaaatattgctaggcatatgataatagcaatagcaaataagatctaacattcatggagtgcttacattttcaaattacaattttgttaatatgatgcctttaaagaccactaatgtgatcttcaagtagaatgccattgacatgctctaaagttacaccattttaaaaagtgaggaaatggaaatatcaaatattgtttcttttaataaaaattggtaataccattagtaacttttataatctattactgcttttcttttttgcaaactcattccatttttatatgggatatatgtgatataagtaagaaagttctgatgggaatattagttaatttgagcatgttcagtctgaatattctgtaagtttcatcagttttttctttatcaatgatataaacaaaaattctcatttttagtcatttttaatacacatacaaaatctccatttcagatttgttccaataatttagcacattctaccgcaatatggggcaagtttggcagagagtagtttaagggtgtaaaagaaggaggtgaaaggaatgaaaatgttttgcattagaggagagggcatagggtaaagagcatcacacaaatagaggacctgcaagaacaaagaagcatgagggcatcagtgatagaaagagcagagagaagaggaaagtaaagtgaaaataagagagaaataattcacttacaaaattgcttaggactgaatcttagatttctgccatacctgagataaaagaggggagaggcaactcttttatctccataaataatctctacaacaccaaatatctaatcctgggagaggaattcatgcctttattaatttacagtaatatttcatacatttaactttgaaagaagctattttgcagttcaatgtgatatttaagtagaggtaaactttttattacagtgaatgataactgaacttcagaaaaaaataatttgtaatatcattgcaacttttacattttgtgaaacattttaataaccaagcattttatggtaaaagtaatctcatgagctatgaatgaaaacattcaagttgtaaagttacttggattatggaaatcttatgagaatatgtagcttgcatatggcagaccatgactcagaacttgcatttccaactgtggaacttactttctacttcataaaattaaaatctggtattttttttctcctataaaaatataaaaagttattttatcttatttttaaagagttggcatgataaatttaaaagcttgaataaaaacaaatcaataatttttttcagttccataaaatgctgagacaggattttttttttagttatgttgagataaaaatcaaataataaagaattaaaaaaaggttgcaataaagaaaaaaagaatggagaagacacaagaaatgctgactatacatcttggatagatgccattagctcttctattctctgttgctcttaaatgctgactgtgtaaactgaggaatttgatataggagaaattattttaaacagtcttccattttaacacgtggcaaacctatagtatgttttcattttgaatatctaatataattctaattataatcattaacccttatgaaattaaaataaattatattaccattaaaatacattctttcaaaaataacttcttcatactacgtattttagtagtgcttactagttctttaataggacctcatggtttaaattgtaaaaggtctcaaaattttaatacagtcccaaattttaaatgcattttgaaaacaaaaggaaaaaacatagctcgaatattggaaagttatgggctgtaaagttatttaaaatattcagaaaaacaaaggtaaattgtatatatttatatttacaaaaaatttatgttttctatgaataacaaacacatattggtcatcaaacataggagaaacctgtacaaggaaatcaaattgtatctgacagataaaatcaagttttggaaaccatccatggatcatgtgaaattcattaatatgtctccatttcaaatgatacttcatctatgatacaggctttattgtctgaaatagtctcatggagtcaacgttattactagtctctcaatgatcatatgaaaattctttaataattcattactttctatttttaaatcagtttatttgggatatctgtaataagaatttcttcagaagttgaataaaataagtctctttaactctttacatttgaaaagttctgcagacaggcaatatgtaattagtaataagcatatgttcgaggacagagtttcacccagaagaaaaaagtagcagcagacaacaacaacaaaaaattcatatgcaaatgtatttgcggagagacacttcacatatgaaaaaacctttgggcacagttaaactccaaatatgataatgatgatagcaaagatgttctattttccttaccatcttttcatttgaataaaatgttcaaatttcagactcatacatttcttcaggcatgagataactattctgtaagaggcgatgacccctttatattcttcagatagtcatgtttctcatcaagtaatgctaaaagaagattgcttctctactctctcaattaaaatcaataaacgtgcttcctggaggatcttcctttctaattctctaccctgctaaaaacaggctatgagagtatatctttcatacatagcatatcaaaaaaaaactcagagatttttttcatcttttgctgcttactgctttaccatcttaaaagtgttaaaaataacaaaagagaaaactcagagcttagtcttggaaatagaggaatatttgtgttatttcatatagttgtaatttagtgagatgccatttttctcttatttttttccattcattcaagacatatttatggagaaccctttcacgaggcaggaatatataatcactgggtagtcaaagcaacttcaattctttgaaggtcttgctgcctagatggtaaaataatgaaaatagtgtagaatttttgatgcaatggcagcagtaagccattgtagagacttgagttctgatttccatattatcctttaaatataaataaaacttaaggtacaacaaatgtcattttatattagatttattgatcagaatttgagtgccttttaaaaactacgagttctcctccattttcaacatggaaacatccattaagttgttgaggtcttttttaatacttctttccactcatatttttgttaccatgacctctcaactggattatttaaattacttcattttttcctctaattcactccttttgtttctgcctccgattatttcaatctcacagctagatttaacattttagagcagtgctttccgttaaaatctctgtgatgataaaaatcttctacatctgcactatacaatatggtaaccacatattgttatggagccctggacatgtagctaatgcaactgagggcataatttcacttatattcgattttaataaatgtaaaagtaaatagctaattttgctagtagctaatgtattgaatggcactactgcagaacaaaaatctaattatttctattcctgctcataagtcttctactcctctcagtgtgatgtcaaactcttcaacatgaatgaaaatcaatatcaatattgatctttgcttatttgctaatctcatatatactccttctcccttcattccatgaaatctattgggtagttagacttaattagtttagtatatttgaccatacacttttctatcacttaatgatatacatgtcattctctctacgtatatggttccacttttatcacaatagaacggtagggccagaaattggatactgtagagtggaaaaatttcaatgatttatgaagatgagaagaaactcactgtattagttttctgtggattacaagcaagtcacacattttgaatgtactcaaggaaaactatgctaaagagactgccagtgaaccactttagctcattctagttcacattctgctctccggtcccaatgtttcacaatcaaatgcaaaatatattcacctcatccccaaattcccaaaagtcttattttatttcagcatcagtacaaggttaaaaattcaatcgtctacatctggtccagttatatatagatgatgctcctggttgtaatttattaagtacagctcacggggtacaattcctctctattgtgaacctgtgaagtaaaacagccaaattggctaccaaaacacatccagcatacaattgtggaacaagaataggatgccaactacagacattgcaggtcaaaaggtaagaaatacaaggtaaaggaagggtcactggtccatgacaggtttgaaatacagctgtgctaactctacctgtatttccttgattagatttcagttcttaggaaaaatattgttcatggctttcagctatgttctttacatttttagttccagtcatcaaatagtccttccttttttataaaatttagcacatgtttatatcttagttttatcagtcacattccttccaatctgtagagtttttggtgtctggaaatgtcctttaattatgtatactctctttccttttggtccaagctagtggtgtttgtactgaactgaatttctaaggaagtctatgagtcctccatagacttccctggaatttactccattagacaaaatgttatggccgcagatcattctgagataatttttctgtaccttggcctattgctgggatagctgagggacaccacccttaaattacctacagactctctaatttgattaagacgatctgtaagtcacacccttaatgttttgaaagtccctttgtgcaattgactaccctgatctttcgatctttctgaggttttaggaaaacagtgtacaggcatacgatcttgccctcattcttttctctaaagtatgctttcctgataatgagtgaatctctgaattttaatgtattttgctatttggagtagctaataatttcaaaatcatccaatcccgatccctttttttaaagcaagtctttcttctatttcttacttcttgcactttgagcagaaagaagtaatcaagccccaacttcaatattttgtttgaaaatctccttagctgtatgactaaattaattacttacaagttctactttcctcataagtgcaagtgaaaaattttgtaaatattctgccactacatggcacaaatatttcttcccccagtttcaataacatgttgatttccttccaagctctcagcagcagcactttagcattcaaatctctgctaacagtctgttcatggtgatttaaactttctgtcttgctcttccagattgttctagtcttgaccccctgcctggtcccaaagccactctcacattttagacgtctcttccagcagcaccctactctcagataccaacatctgcattacttttttattggttaggagcaagttccgggttttacccaccggaattatacaagggaattatacaaaggtttgattcatcaggggttactttaggaagtgtctaccatagctatgttcatgtttatatcaatcccaatgaaagacatgttagtgggaatatatttgagaaatagatagtatcaaaaaattatactgcacattaccattctcacacatgtgtgaaggacataaacaatgagaagaaattatgctaatctgttcactggagcacttgatgcacaaagtaaggatcatataaactctgacgtgctttgcaatgtttgatggtaaacagccaattgctttttaatttataaaaggattttatactaatataaaagtaatttatctttatggagcttatcaaccttagcaaatactgatttttttttctgtacaatgaagtaaaaataaagggaagaaaattacttctatgtaaatgtagaatatgttgtaaaatattctttgaggataagatattttgagttaaattcagttatttaaatattcacagaacatctattatgggccaattactgtgctaaagaaaacgtgttgtttgagttatagcattatcttctagaatctgatagtcaaatcaaggaaatgtgaaaaactataatattacgagtaagaaaaatgttacaaattaggcaagcaaaaaatgtagtgggcatgggaccagaattagaaagcaaaacacattctttctcttctgtaaaaaaaattaaaaaaaatgctttttgtggaaatagaaactgcctgatataattaagacccacaggaactgcatgagtacttgagcgaagcaacttctcagaggtaataaagctccattaaatcacttacccgagacttctgagagggcacttaacagggaatgagtctataacatgtatgtatgtatgtatgtatgtatgtatgtatctatctatctatctatctatctatctatctatctatctatcatctatctgtctgtctagctatccatccattcatcagctgtcatatttctaacgatctatcatgtatccatctgtcatctatctatcgatcgatctgttatctatctatgatatggattgtataattgctaggtaattcatccaaaaaaaatcttctagaatagactatctcttcttaaaataaaatcaatatatggagaaaccatattctaggtcttatcagctgtacttttatttgtttgcttataatccaatagcattttgttgagcagaaaggccatacagaatccactccaacttatattgtggtggagaggatcaggaagaaagaaaattggaaaggggccaaaatgtcagagaaaggaaaatggatgctgaaaatagaagcttgatttcattcaagtcccaaaacaaattttacattgtaaacgtaaaagcatacaatttcttgacattagtaaaataccagactattcaatatgtttttcatgtattgttttttaaatatcacattaacactgtttaatacatactacttttattatcctcattttataaagaaagaaatagaggcttacagagtttaaataatttgttaaaggttgtacatcagggaaaagacgaagtagaccttcaattcacccgatttggctacttaaagctcattacagagtatatcttttagatgcagaccaagattaattggattctttgttatactatctctggaagagggtctagaattttaatcggcatcaagatatgattgattctctgtagtagataactttggcttcaaataaaaagccagaaaacagtagagcttaccagaaccattatcattaaaaatgaacttcagcatttacccaagtgccaccctatacttagaatttacccaaggcccccttatactttagttcaggggaaaaaagtttattgtattgactacctaaaaaaggatataaaagtataaaaatacatttgtttaaaacacatatttgaaatgtattatactgatgttctaagggattgtaaactatttttgacaccaaaaatttcaaataaaatgcatacatatattttttagaaataaatacaatatatataaatcctaagtctacaagtattataaatacttaaattgaaacaagcaatgaaatttctgtaaaaaacaaaacctgcttttaattagaacattttattagtgcaaaattaatcagaactaagaaaatttttgagattaaaacatatttaattctatttgacaaacataccattcaggaataattatttttctgcagatattcatttatttgttcatttgggaatgatttaggacatacttatataaaaaggtctacctgatctaatccacgttagtcagttatgtaattagtcttccattgcaaaatagattttgatgtacataccagggttttgtctataatttgtattacattctttagctccaattgaaaatagtaatgcatatcataaaaagatgtataggctataaatgcatttttattgttctcactccaaaaattttctactacaaatcatcaaaatattattgtgttctacttccttgtatatatatattattttttggtaaacattgacaattcaaaggaaaactccctaacatagtactgtgttatatattttagaaatgatcatttcaatttatgggttaaaaatggtgctctgtatgagtagacagacaatttagccagatatattatatgtctgtatttggcaactacatgtaaattgaaggtttacaattatatgttttattatttggtccataataatattcatatttacaccaagttttgggtattttcttcccaggacttatcaatattaataattcaatgcatatttagttaattgaaagtaaatataaaccacagtgttattttttactattgtttacagaaataacaaaatttgaaaatatataaaatgtgaaagttttctatatgaaatatattttgtcataaattactaaataaatactaatacaacatttaagttgaattattactgggctagtccaatgtatagcttacttgtactgacaatatgcaacacatgatgggcagttccagctttgcggtcacttgtatcccattttcagatatttcccctcttccaggacactgtagcactactgacaccatttaaccaatatgtataattatctgctgcaggtgacatggccttgcttcagaactagggtattatattataggatggctaagtttgccataaacctcatgcaacatcttttcctactacagataactctaatattgtgggatttgctgggtcacatggcccaagagccaagccatgtgcaccacactgttgaccttctgctgagccctttcttgatctgggtgtcaatgaaactaacagcctgccatctgagcagtaggttgagatgtggaatatgctatctccaggacttgaaaattcctaccaggtgttatgctttcttagaaagtggaggtatgcagtgcaagtattttttctttattctgcaataaataaaccagcatgctctggataactagattcttgaaactattgaagtgctgggcaagtgaatatttataagtttatctccagatttgggaggaacttccatcttataaaggtctctcatgtgtttgccacatcttccttttatgaacctatgataatgtcaaaaatacaatggaccaatataatgttctgtagaatgtccagatggcttcagatccctttggtctatattaagacagagggcagagaaattatcatagcctttctgctaaactgttaccatttttgttatctttttgttacacaccacatacacaccacagtgtttggaggctattaatctggactagaagatgacacattagaacctacagctgcaacatggactcgcaagcttaattaattgaaaatctgatggaaacaagcaatgttgcatgtttaagtcagttgcacattcccctgggctgtgatattgctttcagtttactctcctggacaggataggtaaaaggcaattctatagtcttacgcttggccatgtctactccacagacctcaaaattatgtggtctaattatcaagcttgtccattgcaactgtgcattatatatatctatgctatgctatcctataccatattatattatattatattatacattaaagtatatctattatatatatgctatattatatagtatatagtatattacacacacatatatgtatctatacacacacacacacacacacacacagagcccacattgtatatatattgagtatcacttatcaaaaatgcttgggaccagaagtgtttgttacattttggattttttcagattttggaatatttgcgtatacataataagatgtcttgggaatgggattcaagtctaaacacaaaatccagttatgttttacatacacattatacacaaagcctaagtgtaattttatgcaatagtttaaatattttgtgcataaaacaaagttttgactgcaacgtgtcatatgaactcaggtgtggaattttccatttctcgcacatcatgttggtgctcaaaaagttttgtattttggagcattttcaatttgggagcattttggatttcagattttccattagaggtgtgtgcatgtatacacgtacatatacacgtgtgcgtgtgtgcatacatacacacacaagtacatatataaatgtataattgcaatggacaagcttgataatatccacatatctgtatcctatctataatatgtatgtgtgcatacacatttgaagtggaaaatgttcccttgtccccctcgtagggcttgcgataggggtgtggctcgcttctttagtgccccgctgctgagacctccagggtagcacacagatgggcaggctgtggggctcccatcccacggcattgtctaggggtgaatgtttgcagctcctgaacgcccagtgggcgtgtgttactgtgtgctcttttagtttgctgtctataggtggcttgtgttaaccagctcaattagaccctctaccttgtcacaaggacagagggctttctgtatcctgagttcttgccctgttgtacgggaagaatcagatcactcgtgggcttggagaatgagtgcaaggttttattgagtggaggtagctctcagaagatgagggagccagaagggagatggttttcccctggagtcgcacagcttggcggcctgggctctctcctgactgccctagttgttctgccagcgccttttggtactttcctctccgagtccagctgcccgtgtgttcctccgccgatgtgttcctcttgccatccagctgcctgtgtgtctgcctgctagagcctcagggtttttataggcacaggatgggggtgtggcaggccagggtggtctttggaaatgcaacatttggccaggaaaacaaaaaaatgcctgtcctcacctaggtccgtgggggtggaggcctagccagggaccatgcccttctctacccagcacttccctgcccccttccatatcatttaaaggaaccatgcccttcccagcacttcccttccacatcacaattagggttggattcatttataacctggcatccatatgccccaactctaaaagatgccgtgataacactcaggttcctcagtatcagtgactatttacactctacgtctaatagtcactgaaagatttgtgttcttcaatgggttaaatggcttaggatctttggagaagaagggacggactcattaccaaacagatttgacattctgctgcaggttcctttcttaggaagacttggccttcatccagtcgtgtggttctgaatcttaacactgcgtaaacctcagcacctggacaaggggctgtgacattttattagaatgacttccccaggctcgtgatcgttcattctagatttcttttgtttgcaacgattgagcaataccctttttggttgcccattgatattgcccctcagaataatgttgtaatagccattcccattgctcttgctgattatatacataccctcctgtttgcaatactttgtagcctcccattgcattaatgtgtctgcttttttcttcatggttaagtattaacatgtggcctctattactgcagaattttatcattacttttctcttaggaattccagttctgtaacagtatctctaatgggccgtcatgtcctacagaggacagccaatgctgaacttttaaatgagttattttaattgagtaataaaaaatcagacaaaactacactttatgtttggaaaatcactgagtggggatacaaagagaaaattaaagagaaatattctttgtggagaaaaattggaaaatgtgcctgatgtatttaagaaatagcaaaaaggacaatgtagctggcatgaacaatcaaaagagtagtaggcattgatgctatacatacatatatatatatgtatataggtacacaaatacatatatttatgtacatatgtttctgtgcatatataaagatatctttctgaatccagatgcaatataaaattaaagctcttacaattgctttcaaagttcaacaaggtctatacagacataaatacatatattaaaaagtatatatacacacacatttctcatacaataaatttgtattttatatataatattgtatattacaagaaattaacatattattacatgttatgtatttattatatattattataaatgtatatgttcctgatagtatacatattatgtaaaaatatatatactatgagaaaaaatatatatgtagacattgtgagagcttgagagccattgtaggaactttgattttatgttacatgaagtgtagaacagttctagaattttgataaggtaactaacatcactcttttaaaaatattcttgtctcttattttgagattatactgtaggaaatgatgtgtggatgtattaacgttaattaagaaccgaatacagaaataaatgagaaataacagaatgtaacttggatgataaccttggagtggatgattaatcgtcaatagttgatttgatgtcaataaaaataataggaatagtagctctatccccaagatataaagtctgagaaaagattggatgagacacaacaattgactcttaggtatgatttttttccctttttttatggatcctgaatttgaaaaacaaaacaaagcaaaaagcaacaaagaatattattggaacaattaggaaagttgaaatatgcactgtatgttacataacaccattgaattaagattcaatttcctgaatcagatatttatttcatggttacatatgatgaatgcccttgttcttaggagatgtttgatgaagcatttcacaatgaagtgccacggtatctttaatgaattcttaaatgcgtcagcaaaaaataaataaataaaatggatgagaagaaaaggtcagtactatttagaaacagagaaaaatagagcagatgaaattcactcttagattgaatttatgctgcaggagaaacagcattcaagaaaaatgataatgttttcaactgagcaatacagaataaagtttccatcaataagatgtaaaaggatgtgggaggagataggtgttgaaggaagaacagtactagtgtggttttggaaaatttaagttaaagctgctgattaaacactgaattagtgacaataagtatgtagttatttttatttttttactttttaaaagatacatgtgcagtttctcacatggatgcattgtgtaatggtaccatttaggctgctagtatacccatcaccaagttagtgaacactgttcctaataggtaattttcaacttgtattcccatctcatactctcctgccttttggagtccttggcatttattttttccatcttcatgtccctgtgtatcaattgcttaggtccccataataagtgagaacatgtagtatttgattttctgtttctaagttatttcacttaggataatggcctccagctccatccatgttgctacagaggatacaattttattctttttattgctgcatagtattctatgatgtatatttaccacattttctttatttaatcagccgttgatggacacgtaggttgattccatgtctttgctactgtgaatagtgttgagattatgtatggatgtaggtgtctcttttatataatgatttcttttgggtagatagtagtgggattgctgggttgaatggttgttatacttttagttatttaaggaatctttgtagttacttctggaagtttgtagtgaaggtaagtgttcacaattaaaaacaaagatttggatatcatttacgtagtgatgttattttagcacaggctgcatgaaaccataaacagcttagaagaaaacgaaaacacaagaataaaaactatttcctcagctatgatggtcatttctaattgtagaaatgaggtaataaaagaaaatttatgctcatttctaatattttaatgacagtatattcaactgtcatttgtaaaattttttataaagccaaatatctctttcccataaatggagcagtagatacgaaatgataatgaatatttcaaaattattagggcattcagtcaatattcgaaactgagaatagatatatcaaaacacaaattaacacacctattttcagtttcacctcacactatttctcttataaccacagatattagctataaaatgaaaataccctgagtgaatcatggccccaattcctactaagcatgtggaatgtttgatataactagtgtattatttttgattactgttttgaaacttaccaatattagcaaaaatattggaagtcatggttaaacgcaatgattactataaacacatatacacatgagtaaatagtaatgtatatagattatcctatttataaagtgtatctggttactaacgcttcccaattaaagatgctaagaaatatttattgaacactcattataagctacattttattcttgatattttagtttgaaatatgtccaagacatgttttctacctttgaaaatcttacaatctaggacgggaagcacatacctcactaaaaatatccatatactaaatacagtaataagaatattcaaagtcctacaaaaatacaagaagaacattttattcattagaatcgtttattcattagaatcatacattgcattcaattgttatgtctcatccattatgtaaatgaataagaagggtaaaatcctgcccctgtcagagaccttgtgaatatacatttgtgaatagtaacttcatttctattacccttacgttttaagttgtagcgttatttcgagaggaatgaatacaagcattgagcaatcagccgaacgcatgggtaatcctttaagttctgaaatcaagactcaggggcgagggccctgctggagttctatagaacagcaacgtgtgtacataccaccagtggctgaatgacctagaggggttcatgtacagttttctttgcagaattctcagagggttttcagcaaagttgtaacaactatgtaacccagacctacatctccccctttctagtagattcaaagaaatctctataatcagttccttgaaattggaagtgagtccactgtgagaaaattgatgaatgtttgtttacctgctgggtgtaaaaatggaaaaatatcaacctaaggaagtatttgttttaatcttgtgttgtgcttgatgattatgcagcaactggaaacgggctatagggcaagaaatcaggaggcagccacacactcagaagttcagtgctggccaacagatatttatttgctgccaaaagatttctgctcaccagaaagcagggtagttccaggatatttatataccctacagctgcagcatggtttataactcaaatactggagaatctccacatctctgtatctcagggatacaaatagaaacatgttaaaggaggatgcttttggactttatcctttttaaattatggcttaagcacaaaaatgttacaaaaaaatgtttgggggtgtgacaaggagattgggggctactgcacacttattaagttatgagacttcaagtattccagaaagcttcatgtttattataagcctattggcgtatgttatgaaaaagttacatactctgtttaaatattgtataactcagttctatcttattgttacatattcaaacatagaaaggaaagtgtctttcaagaggtcaaagaaaacaaaaacttcaagaggtcaaagaaaacaaaaatgttaacttagaaaagtagaccaccaattctagggcaagaaaagttacaagcttgagtatgctgcaggtgggttttcaatgtatatggaagtagtttccatgtctcaagcaatgaaaataaatataatttaaaatagacagaggtttcacatggcagggagaaattgagtccatcgaaaccataaaaagtgcaaacagaagataaaaggaatgtacgtgtgtctaagagaactgtgccattcagcagccactaaaacaccaccacttaggaacaaggcagaatgtaaattccacatgggcatagagatttgttcattgctatgtcagtagcacttaaaatagtatgtggcttacatgttgctaagtacatatttgtggaatatttgaattaatgaagaaagatgggatgagtgtttacagaggaacataaaaaagaaacattttaataatataaaaaagctttgtctatttgaaagtaaattaaacataaataccaagttgagtctagggacatgttagataaggtgcttaaagtttgtttgaggtgctgctgaatcccccatcaccatctatctgggcagagacacagaattcacaattactctggacctatgtttccttaccttagtgcaaaccattctatcgaactgctatttttataacaatatcttctgtttctcttaaaacttactgtgtatttcattcacttagagtttggttaactaactaattagatataaaccattatcactatgttgatatgactgacatttaaaaatgtaattggctctccctggtttatatgtccacaaacgatttgatataaagatggatagatgaatgattaatgatagatagaaagataaattgatatagatagataaatgatagatataaacatataagtagactcaaatatttaggggtcttcaaacttgcaaaactgaaatgaagaataaagctatctccagccctctaggaggctatttaggaatagctttattaaaagttattttcagatatttttatactgaatttatatccatagacacataaaaagtgatactatgctaatattgatagtaatgtaaagttcaagtcttttcagatcatttttactctgcataatgagcctagaataaaagagaaactccagagttaaaatggatgtaaagttctagatcatagtaagattaaaatacttttcctataataggccattatgccaagggaatggtcttacttattgttgcataagtgtcttgaaaaggacttatggctatatttcctctagggatttcatcatttcagattacaaaaattcattaatctccaaagtcctaaatattgtcatttttgtaaataagtactcacagagcatcccagatacaatgtcatagcttgaccagaaattagtagtcgtttatatctttttattcttacccatttagtggatcaatgagaaagttcagtgccaagagatcagccatgtcaacaatggccctagagttaagggggtttctctcagaattataacacctactttctaaatttggaccagtatcttttccattctaatagtggttttcaaacttctctaagaccaccagaaaaagaaattagtgggatcagcattctggagcttctgagccctctggccctggttccgctggacatattttattctatcccatatctagcttttatgataaattttgctaagaaaaggtttatcttactaaaatcttcaaaaatcttatatactggtaatatggtttggctgtgtccccacccacaacttatcttgaattgtaattcccaagtgttgtaggaaggacccagtaggaggtgattgaatcatgggggtgagtatttcctgtgctgttcttgtgatagtaaataagtctcatgaaattagatggctttataaagggcatttcccctgcgcacaccgtcttgcctgccaccatgtaagatgtgcctttgctcctcctttgccttccactataatattgaggccccttcagccatgtggaacagtaagtacgttatgttaaacatctttctctttatgaattacccagtctcaggtatttcttcagagcagtatgaaaattgattaatacaagtaaaaaacaaatattaagtaaaatgaatagtacttaatataattcctccttttaagacagaaaacaccccctcaagatggatgcatagaggaaactaaataatatccctaaaaatggtggcaaaaatgtttcttgttaactattagagtgaatcctgaatatttgactctaaaattctgtttttcatcagtaaaagagatcagtagattatatcaattggaaaagatttcacgagaaagcacattggaaaataatctcaggtggtagtggcagtccagatgaatataaaccaaaaacattgtagttgagcttccaatgcaaagaagaaagtagctggtaaggagactccaagcactgtttaaaaattaagcaagaaagaaggtgtgaaacaaatgagatcaaaagtctgtgaatataaataatttaagtgtcatgagaagaaacatgttttgtgtgatctagtgtttcactagggttatggataacataggaaatgtatcacaaatcatactttttatttccagatggtttggcttctgattccttgtgtaaatcatttccaaaatctctagaccagattcctacaccaaacacaagcctaccagttgttcatttggtccctcatccttacttagtggctaatgcagaactacataatctatggaaagcatagtctactctctatgactcgatactcatccaaattgtacccgcttgttattttcacacaagatgaagcacaaggttctatctcctttagaaatggttgttctaattcaagtccacttgcttatgggattctataatatcattcattagcccagtctctggacaaggattcaggaatccttagggccatcgaatattttaattgtgatattaactcatataacttcagataatttatcagttatttttcttaaaataacttatttttcctgagtataaaatttcattgaagaattccacctgcagccatgacaaagtcattcgcactagattggttaccgtaaatgttaactataaaaacatatgaggaaattatttttagagattgaacaagtttcactagattgtactctttgtcaaaagtatctacttgacatgaaccccatggttattcctcagtagatatggcattctccctgtcggtcctttagagctgaaagcagagatataaaccccaaatggatgaccactttgctgagtttaggaggctgctgcagctgatggaatttgtagggcagaacatgtaggggagggatagcagtgggtgatatacctaatgctagatgacgagttagtgggtgcagcacaccagcatggcacatgtatacgtatgtaactaacctgcacaatgtgcacatgtaccctaaaacttaaagtataataattaaaaaaataaaaaaaaaataagaagacggagctgcatgaagtgatagggtaggatcccaggctcttcacagaatatatgaggggttcctggttaaagtaggaactatgtctgcagagttggagactctaaagggatataggtatgctaaaattttcctcagctccatgaaaatgtttcattgtaaaggaaacacaacagcagggttacccacagcagctccagcacatccgttacacagaggcagctgaagcaatgcgttgctgttgtgtcctagatatttaagaataatctaagacaaatataccaacaagaaaaaggaagtaggaataagccacataatacatgttaaatgactaaagaagatatttacaaatagatagcaatgcatcagaattatgagacaatatggttaaatggtattaaaatttatgaaatagtgcataggataaacaagaataaatcaattatcagagaacataattggaatgagagatgttttccacaacaaaaacattcaaaaaatataattttttttttaaaaaatatgagctacggagttgattttaaagctctatgtaatgttccagactgagttaggcagaattttaacaattaccccaacactccactccatggtctataccacctgtccaatgttctacccttgaatatcgatggatctgtgatttaataagatatggccacattatatgagaaaggtaaaggaatttgcaaatgtaattgagatttctaaaacagttagcttccaggttttatcaaatggtgattatttggggtgaggcaaacccagtgggttggaagaagaagcatattccctttgtagcattttagagagggatgtggcaagaaactgggagtggcctctagcagctgagtacttcagttctatacttaagggactgctgccgaaaatgacttatcttgaaagaggacagagactcagacaagactgcagatctggctgacactttgatttcagcctggtgagatcctgagtcaaccctgtgcaggttcctggcctcctgtcagtcagacagctctccatggaaaatgttcctccacatgactcaactattctggtatcctcatattcttatatcggagcagatctgcaccaaggagaagcaaggcacaatctaatcaccattcaagcaaagtttctatgagaaaacaggaagcatgccagaagctgcaccaacagaatatttcccagtttaacattttaaatatatctcctccacagaatatattattggagctttttaaaataaactgagatatccaaaagaatcatgttacaaagttcaattttgctaatattcaaatctagtcctttgtagaaagacattcaaaaactcaagttacactaaaaaaaaatgcatcagagcagaaaaacaatttatacctagatgtgaaaaaattgtaacaaagaatttataagaaagacagtcttttgggaaaattgaaaaatcatagagtcaaataaaaattataaaaacggcaaagtaaacaaaccatgagataccgtttccacagagcagaatagaaaaaatgactacaacctgaaagtatatactttcacacatatacaatataagtatgtcaatcacagctgtttcaaatactgaaaagtcagaacaattccctaatacaggtgattactataggagaatcattaaacattggaattaatacattcatggaaagacaggcaagcatgtgtagacaaactaatagaaaaaaatttccccaaacattgttaattgacaaaacaagtcactacaaagtaaattaaatgtaattcaaaataaaacataaaaaccaagtctactatgagtataaatattttggaactatataaaaataatgaagcagcaaattattcataattgttaactctgaaagacaggggttttttttgtttgtttttgttgctgttattgtttttgagacagagtctctctctgtcgcccaggctggagtgcagctgcgtgatctcagctcactgcaacctctgcctcctgggttcaagagattcccccgcgtcagcctcccaagtaactgggactacaggcgcccaccaccacgcccggctaatttcttgtattttagtagagatgggttttcaccatgttggccaggatggtctcaatctcctgacctggtgatctgcccacctcagcctcccaaagtgcagagattacagacttaagcccctgcgcctggccaaagatgtgtgttttaattcagaatacttcttgatatatgcttggatctttttcaacaaaatgcactcctatgttacttgagtaaattacaaaattaaaataatctagacatttaaatttgaaaatgtgcttttcagccattttggagatcaaatactgtcaaattgaagttcctttgcaaatgaaaaacaacaataaactcaaatgatatcataatgggtgaaataaagcaatgtggcctgacaattgtcatcgttaacatttatagtttcttgtaagagttgtgcttatttaccagataaacaagacaaatttaaataaatatgaaataaattatgcatattgtaattgttgagctgatttggagttttatgccaatattatctatgtatttatcttactgtattatgaatcctcatattgattacaactacttgaagcaggccagcttctttatattggaggtctgttagtataggattcgacaggaaaataattattattaattaacatacaaataaaatatcagaggatgaagtatcaaatcagaagacacagtactcagatgtcagttgtcaaacaaacctgggaggctgataatcacagttgaattaaacaaggaagagaaggtgaagtaaacgttgttaaccacaaaccaaaagaatgcagtgtaggaatcctgctgaccaagagcctggggatattggaagagaaaccaaggcataggaaaactgggcaatacgacaaaatacaatccccaaatcttaaagagcgaggcataaacagagtcctagtaatccataccaatagagacaagaagtcctggctgggcgtggtgcctcatgcctgtaatcccagcactttgggaggctgaggcgggaggatcacgaggtcaggaaatagagaccatcctggctaacgcggtgaaaccccatgtctactaaaaatacaaaaaaattagccggcgtggtggcgggcgcctgtagtctcagctactagggaggctgaggcaggagaatggcgtgaacccgggaggcggagcttgcggtgagccgagatcgcaccactgcactccagcctgggctacagagcaagactcgtaaaaaaataaaaaaaataaaaaagtcctatgttgtccatgtggccattaacagcaacagaagacagtgtgttggtcactcattccagagcagttgttatctgttccgtcctgaacttgtgttcgcttcttgtgaggactctcatagatgatggttgtttggtggaaggtggcttgcagtagatttctgtgatttctggcttttcaattttttaaactttcattttagatttgggggtacatgtgaaggtttgctacataggtaaacacatgtcacagggtttttctactgttaggcactgggcttaatacctggctgatgggattcctggccttttaaagtagaagcagcagcagctgatatttcctgagagttttgatccttgatcacttgtgtcttctctacaacattgcctaccagagcttggacctgtaggccaggttctaaatatgctttaaaaaagagtaaaaaagtacccatttctgttttttcacaaacatatacatacgcacatgtgcgtgcacacacaaacacacacacacccacacacgcttagtggagagagcaaaagagagagagcaaaaataatcattaataaattgcattagttaaaaaaaaattctttctatatttccacagtacaaatcgttaaatgagtactgggaatgctttctcacttgctaacattaaaattatgaaggtattttagaactttaagagcaagacattttagaaaataattttcagaattctccagtattctccatacatagtaaactcgttaaatatattgagtaaataattgtttcaagatataaatacttatattattttgttgttgtagttttctctttttgtaagcctattagtcagaataaaatcaccttacatccagttcttcaaattttagaattgagaatatttagtggcgttccagtgcagcgttgaaatgtgcgttgaaatttaagctttctcaaaaagaaggaaataacgattttctcatctatatatatcccttaagtaggagatacctcatttgagtagcaaattctgaagaaatactgaatgtaaaatgctatttgttaaatatggagaaactggaccctgatagggaaagtcttatttaaaacttcaaaaatttcagcagtattgacagtgaaagatatgagctagacagaatgtaaaatggtaatcaactaaaacacttcaggctgcaagctgtggcttcagaacaagttcaaactgcttttcaaactctacattggcttttactatatgtgccctcagcgcctcaaactatctgagcatctgataagaaatagaagcactaagttggtctgtcctgattcttgtgtacaatttttttgtcagggaaaatagcaaccaatcttgtacacccagatttgtgttccttcttccgtgtaatcaaactcagaaagtcaactaaataaacagacgccttattttctttacatattatttacttctacattaaaataatacttcttcatttaaaaatgtttccctgatctttgtaaaagattaaaattttaactaaactatagatcaactgaagcccaaaatacaagtgagtaaggaatacagccacctatattgaggagaaaaagaaaatgggtgatgctgaatattgcaaagtgcaaattggcagtgtactctccattatctttgttaatggggcaacgtggtggcccagtcatctgggccatctatagtaagtcctctaatggtttatttcctttagcctgtgatatattattttattttgttcctgtgtatgtattcctttaattatattttaacactacattattaaaataaatgtgcattccttgaacacacactgggcattgaggaagaaagtctgtatgtgaaaggctgttgaatagaaagtggaggatattccaccactaaaattttattattttaatccagaatacagataatcaactcttgaataaatataagataatggcattacttaattgatgcatttgtatattgaatgactttatatgaactgagaagacgtattttgaatcttataaatgcccttcatggctttcgatgaaactagattagaaagaaggcacatcaactgtagcagaatatatttcacatacgaacacagaaacacatggataaacaaaaataatgaatagctcgcagtagtaaaaaaaaatactatgtcttcaaaacacttaagggtatacacataggcagagaaatggaaacagaatcagtagtagaagtaaagaagagctaaatcactcagtcttgtatgccatttaagatgtgtgaactttacaataaagtaatagaatatagagtaaattatagttcagttaagaatcatcaacgaattttcattccaaatagtcaaagtatgatcagtaacccaatattaatattgtctcaaatatctcctctaaacttatttagtaactgcaaatgaacttaaaaaagtattaactaaggaatagagtaactgtacaattatttaactatatgatcaaaattaaaatgacaagtaagactgaggggatcttgtgcctctggaggtgttacactaaaagaacaaagtatcatttataaaatattgtagccaaaaattaataacaaacttaatcacgagaaaacattagaaaatccaaaattaagaaaaagagttttgtttgtatttttcaaaaatgtcacacgtatgaaagacaaatgataagaacacttttcagattaaaaaaatactgaagagaatgacaactaaatttagcaaaggatactagacatgaacgggtgctgggataaacaattactttaaaggacattcttattattataaagcaagtgacatatttaaaatagaactttcaatgattagatgctaacattgaatcaaatatacatttactgacttttaaaattatactgttataaaagaaaatattattctcagaaaatacacagcgaaggctgaggggtgacgatgcatgatgcatgcactctgctctaaaagttttcataacaaataatatggaggaggaaagagaaagagaatgataaagcaactcaggcacagatgttaaaatcttggagaaaacagtatatggaaaatttcacaatttctttgcaaaatctccgtaaatttaaaattatttcacaataaaatattttaaatattctgaacaacaaacataaaagttttcttcaaagagttaaaatgttatgattttatttatttattatttatttatttattgagagagagtctcgctctgtttccaggctggagtgcagtggtgcaatcttggctcattgcaacctccatcttctgggttcaagtggttcttctgcctcagcctcctgagtagctggaattacaggtacctgccaccatgcccggttaatttttgtatttttagtagagatgtacttttaccatgttggccgggctggtctcaaactcctgacctcaggtgatccgcccgccttggcttcccaaagtgctgagattacaagtgtgagccaacacgcaaggccaaaatgtgattattttaaaatattaccctgggtgtagtgaggaggacaaattagaagagtttttatctgattacaggcagaccagttgtgaaggtctagtagttatttaggcgagtgatgactgtgtcttttcatacttcattgagagcagtgatggatagaggcagaagaaagaacttggtgatatacaagcaattgaaaaagggggagggttgtaaagaaggtattgtgtagatggtacaatcaatgcagtagggatccaagaaggaattaggttagcttggaatgtgaaatgcctatagaactattacatgataatatctaatagccatttacgtatactgatttgtaactcaggggacaaataatagtggaaatatagtttgaggttcatattttgtcaccaagagcacgctttattctgtgataaacattagagttttagcatttgtccatggaaaaagtgggaagcaaatgattatggaagacaaacaaaagaagaatttcaagaaggaagaggtattcagatttgttataaacacggcaaaagtcaggtaagatcaatacattactttgctaggattgttgtaaagaagtatgacaaactgaattgcttaaacaatagaaacttagcatttcacagttctggaggctcaatgtccaagatcaaggcattgtcaaaagggttggttccttttaagggggtcaaagaaagctcagtgtcaggtctatctcctgggcttactgatatccatcttcttccttgcctcttcacatcctcctccatccatgggtatttgggttcaaattttctctttctataagaacaccagtcatgctggactaggcacccaacctactctggtatgaactcatctcaaatcattacatctgcaatgaacttatttacaaataaattcactctgcaaagtactggagattagaacatcaacctgtgaatttgggggatacaatccaactcataaaaatcagaaataaaatattttttgggttgaccaaggagggtgatatggtttgtctctgtgtccccacacaaatctcatgttgaattgtgatcctgagtgttggaagagaggcctggtgggaggtgattgaatcttgggggtggtttctaatggtttagtgccaatcccctagtgctgtttcataatagagttctcatgagatctagttgtttaaatgtgtgtagtgcttcgtcttcactctctctctctcctgctctaccatgtgaagattgtgcctgcttctcctctgctttctgccatgactgtaagtttcctgaagccttcccagccatgcctcccacctgtggaactgtaagtaaattaaacccttttttctttataaattacctagtctcaggtagttctttatagcagtgtgagaatggactaatgcagaacattggtaccggagaagtgggccattgctatgaagatacctgaaaatgtggaagcaactttggaactgggtaatgggctgagtctggaacagtttggagggatcagaagaagacaggaagatgagggaaagtttgcaacttctagagacttgttgaatggctgtgaccaaattgctgatagcgatacgaacagtgaagtccaggctgaggtggtctcatatggaaacaagaaacttattgggaactggagtaaaggttacttttgctgtgctttagcaaagagactggtggcattgtgcccatgctctaaagatctgtggaactttgaactagagagagataatttagggtatctggcagaagaaatttccaagcaacaaagttttcaggaggctgcctggctgcttctaacagtgtgtactcatatgcatttgcaaagagagtttctgaaactggaaattatacttaaaagggaagcagagcataaaagcttacaaatttgcagcctgatcatgtggtagaaaaggaaatcctattttcaggggagcaattaaaactggcagaaaaaatttgcaaaagtaaagaggaactgaatgttaatagcaagacaatggggaaaatgcctccaaagcatttcagagaccttcctggaagcccctcccatcacaggcctaaaggactaggagagaaaaatggttttgtgggggcaggcccagggccctgctgctctgtgcatcctcaggacatggcaccttgcattccggtgactccatctctagccatgccttagcttgagccaaggtacagctcaggctgttgcttcaggggtgcataccctaagacttggtggcttccatgtggtgttgggcctgcaggtgcacagaatgcaagagttgaggtttgggagcctctgcctagatttcagagtttgtatggaaatacctgaatgtcaaagcagaagtctgctacaggagaaaagccatcatgaagaatctctacctgggcagtaaaaaggggaaatatgggaccgtagcccccacacagagtcccactagggcactgcctagtggagctgtgcaaagaggaccaccatactgtagactccagaatggtagatccactgacagcttgcaccatactcctggaaaaaccacagacactcaatgccagcctctgagagctgccatggtggctgtaccctacagagccgctggggcagggctgcccaaggtcttgggagcccacctcttccatccttccatcatcgtggcctgcatgtgagacatggagtcaaaggaggttattctggagctttaaaatttaatgactgccctgctgggtttcggacttgcatggggcctgtgacccctttggtttggccaacgtctcccttgtggaatgggagtatttacccaatgcctgtatctccattttgtcttggaagtaactaagttgttttttattttataggctcataggtgcaagggtcttgccttgtctcagatgagactttggactgtggacctttgaggtactactggaatgactgaagacaatgggggatggtttggaaaatgtgcttgtgttttgagatgtgaggtgaacatgagatttgtgagggcccaaaggtggaatgatatggtttgactctgtgtccccacccacatctcacgctgaattatgattctgagtgttggaatcggggcctggtgggaggcgatggatcaggtgtgtggtttctaatggtttagcaccttcccaccagtgctgccttctaacagagttctcacaagatctggttatttcaagcatatagtactttactcttctctctctctctctctgtctttctctcttttctctgccatgcgaagattgtgcttgcttttcctttgccttctgtcatgattgtaagttttctggggcctccccagccatgctttttatatagcctgcagaaccatgaaccaattaatcttcttttctttataaattaccaagtctcaggtagttatttatagcaatatgagaacggactaatacagagggcttaactgaagttcaagtaagaagttaactgcatgttaagagaagcaatgaggaaactccagccatcagggttgagaagaaaaagtgaggtgagggaatgagggctaccagccatgtggtgagttccagaagtatggctgctgtggaaaagacaaagacctagagaaacttaatttttaaattatggaatgtaaaagtaaaacagaagcttgaattcttaaatttcagaattttcttaaattctgaaaagaagcttaaattctaaaagaagtctctaaggccaaattacgaaaaacagatagtgaaggtattaaaagaaaaagaaatttataagaaattggttatccatgagcccacgggactcagagaagtccaggaccaccaatcccatagtaacaaggagatagggataacaaataacttgtatctttacatatctgtaggtattttaagtgaaaaaatgggacattattctgcaaacaattcacatgtaaataacattgctatgcatgtaaattatatagatgttattatatttttattattatgggtagcactataacatcttgtattattaggtacactttgtaattcttactgggaaataaccaatttagagaatgagttatttttctggagtctgaatagtgaaagaaaatttgatgcaatgtgttggatcacgtccaaagctagatatcaataaattttatcatagattttgcccttgcattggataattcagttttcttatttctgaaatgcataaactaaccccacctttattaggtgcatataatcctatgtaaatcaaacaagattaagaagacttgtaattctgcattcaaaagttaaacgtatctaatcccagcactttctgaggctgaagcgggtggatcacgaggtcaggagatcgagaccatcctggctaacacggtgaaaccccgtctctattaaaaaaaaatgcaaaaagaattagccgggcatggtggtgggcacctgcactcccagctactcgggaggctgaggcaggagaatggcgtgaaccctggaggtagagattgcagtgagccaagatttcgccactgcactccaggctgcgagacagagcgagactcagtctcaaaaaacaaaaaacaaaaacaaacaaaaaagttaaaagtatctctaaaaggtactttcaaaatctatttttattgttccataatgaaaataaaatgaattttcaaaaaatttggtcataaacttttcacaatataatactagctatattcattctgtatttcctttacagtagaaaactttctctgggatatggatacctgacacttttttgttgagcatcaacatgagtttttctaaccacagatttctagatacatacctgataccctgaacttcacaagaaatcggcaatcattaatgatccagctaaagtaagtgactaaattcctatgggaaaatataacttttttaaaaattaaatttagttagctgaaaaatgtcaagcacaattaaaattgacattttattttattgagtatcatatattttaatgagcttgggtcctaaaatggttttatcaactcctctagttctttaattctggcattcacatttatctagaacacaaatcaacaagcatgatcaaaacaaaacaaaactctgcacttgttactcagatcagctaaacaaatatggtaaagtaatcgatttgagatttgcaaaaactaagttctttgaggtaggtaaaattttaaatctatttactaaaaggatcatgtgtggagaataatctaatatattttgttttttctaaacatcttctattatttttattattactataattatattttagtttggcacgccctgacctccttgctgtcaaccacagaaaccaaatattaaatgcaacctattaccctaaataggcaacctaatattattattattattattaccatgattatattttagtttagcattccctggcctccttgctgtcaaccacagaaactaaatattaaactcaacctattaccctaaatggacagcctattatacctaaatacagcctaaattacctctacatgcttttgaagagtccataacgttgctagttgttatctttaatatcttaacaacaaaatagtgaagataaaaatctcaatgaatgttcttcatttcaccctcacctgcttttgctgggacctggttgtccccagttcctcacttccataatttttacatttgtgtcagctattcctttattttaaagagtatactcaggattcatccttaagaaaacacatcatttcccaagctcacatcttctggtaaagatacagatctacctctcattttcccttttagactctgcaggtctctacagtcatggctttaaggattatcaaagcctcctaataatcacatcctatattctaaacactgatattcctctaatgtcctgtgccattaatcacattatacagccccttccattttatcctcagaacagggtttcagataacctagattctcctttctgactcttgtactatctaatcataagtctcaggacatatcagttagtgatttttgtcttcaattttctcagtagtgaattgaaggataggtttcatttctcattcttcttgggcaacagagttacataatgggaaaattactgacactggagccactctgaagtgggtacaaattctttcagacaatttattactatgtgaacatgatgaatttacagaatcactcagaagctgagatttctcacttatggtaaaagaatatcaattcttcagattttgcagcatacactttctactgttgtgctatgaggcaaaaataaaagaccagaaagttttataatgttaatcttaatctcttagataagcatcatctaaccgtaactgtgcattaggcctttattttcagctgagtgcttgatcacccaggatgtccagtgtagtaaacataccagagtttatctatatccgtttgtccttttctccaggcacgaaaaagttatacatgctgccctccttgtgtaggaaagggtcatgtggctaatttgaacaagcaattgtaaatgcaagcagcatacattactcacagtttgaagaactaaactgccagtatgagaatctccagcattttgtgtgggtgtgtgctgtccagaaaaggcagcaccagatgacacatggttatggcaaggtgcagcctttctaatttgattcctaagttgtcctgtcgaacacaattgcttggagaaaggctcaactttctgtgaactttctatgagaaacagagagagagaaatccttgtattaaggcaagattgaaactcacacacacacacaaaaattctaagatattcattttattcagtcagcaggatgctaccccattattagatagcagattttggagaatctcagtaccaaacacctattgaaatgtaatttgaaaaatgtcttaaaactacagaaacaataatatttcaaaaataaaatgattgtatttcttgagcgaatgttattgtttgccattattctctcaggcatcacattcagataaagacacaaacatttccattccttagccaacttcccactatgatcccaggacctcctccctccaagacctttctaagtgtgctgtcttcttctctctctcaggtacaaaatggtatttttaagtaaacaacactgagtttttaattacttaattctactttgtgtactcaaagagttaataaaaattgcttgaatttttattttagtggaagtgtaagcaacaaatagccaatttggattttcacacagtcaaaactctgtcttctgcttctacctatattttgttataacaatttttgtatttcacagacatgtaaataaaactgcaaatttcaatcaatttacctttctgaaaatagtgacttctatttatatgtgtgtatatgtatgcataagtatatctaatacatacattattagatattttaatatacattatctcatttgagagcaaatgtatttttatggtggcaaatgattctaagatgacatttaacccatacattcaaatacagctgtgcttaattttataatcaaacaggttttgtaatatagaagatgattttttagaaatccctaaagaaattgatagacatttgtatttcctgttttctttgaaggagggatttacacaacatttttaaaagctccagtgcttataaatatcccctgtaaaacaaattatagtttaaatccattatggtttctatgtaaaaggaactcagtttggttaaaaacataaaattttcttcacttatgtaaattctgaattttatattttattaacataattaagctttgggggtgacagtatcctttaacggaattcagcatataatatattgctctttattttcagaaaagaattaagtaggaaattatgatgaatacatgaattatagacaacagcccagtttaaagtgattttacactcagagatctgaaccattctaattctaaggtggaagaaagaccaaacataaaagattttcacattccttttaaaaaacctccactgtagaccattgtatgtaatgattcttcagccaaaggcaattttcttctcaaggtacaaagtctaattaggtattaagtcataatcatgtgttttcaggatttagtttcataaattaagtcttttctagactccaaactgggcaggaggaaataagttcatgcaggagaaagaaggaaaggagagaaaaataaatgtatatgcaggatgcaattatttctctttacaatatggacattcattactaacagaattaaaatagtgcacttggatattctggggagcccaatatgatggtcattgccaacttcctcaggaattactaatcaatagttttcaggtggtatcctttggaatgtaacaaactcacctgatgttattacttttgtgtaatttccctgccaatgatatttcttttctggagtgtctgaagtaaaaattctgttcagctcctacttatagtttgctctaataatttttatactccatagacaggtcaatggaaccgcaaatttaaatcaatttgtctctctgaaaatagtgatttatatttattcatatatatgtatatgagcatgtctagtgcatactcatatacattatctcagttgagagcaaatgtatttgtatttgctgctggcaaatgattctaaaatgacatttaacccatatactcaaaaatggttttgcacaagtttgtcaccaagtagtaatcatagtacagaagatggtggaattctcaacaagaagaaagctaacgctgtcaggcaatgtgttggcagaattggtgaaaatctatcattaaattaaataccattgactttatatcgagaaatgttgccatgcacatccttaactcattaaacaatgcagtgttggaaagaagagaaaataatatatccctttcctattgtcaccctcattacagagaaaaacttagagatgttatttatcagaaaaataagcaattattttctatgatgaaattggctgtttttgaaatcattctgtaagtgaaatgtgaagagagggtctcatacaattctttggaataatgttatatggagagctatatatttttaaatatatcattgtgtcaaaagattagcatggagtattgaaactattgtgatctcacatgattatcataggaatataatgaaaaaaatagtgaagacctgggagaattgaccagcaactaaggaggaaaacagcagagcaaatagaagcgtatatacccataatacaattttaataattgcaaatgtattttttaaataagaaattaaaaaaacacatcaggacaatgaaggtcttgtagaagtctgacaaaaataactttctaaaatacatgctaagagaaacaaaaaataatttaagaaaacctcttgctaggcataatagtatttatcttctgagaaacagaaagtcataaaaacagcataaaataaaatagaaacaataatgaaaaaagttaaatgaaataaaaataatgaccaatgttttagaaaagacaaaattgagaatgataaacttcttatgaaactactatgctaaagtaaacaaatctatgattagagacaaatctatgacctaatgtcatcaaacattaaaggatatagactttggtaacttgcctgttggataccatgaacactgctgaaataaaaacacatttagaatgccagatgaactgttacataggtaattgttaattcatagttgactttagatatgtacaaggtaatatcactaacaataatttcagaatattacataatattgaaaatgagaaacaacctaatttgtacattaacacaagagaatagaaactaaaatggagtatgcctaaagactggagtagtatgagtatataaataaaaaattaaattaaatacataaatatatataaatataacacacgcttatatgcacaacgctatataaatttattatagttataagagtataaatagtattatatactgtttagcaatactaagtaagtaaaaaggcaaacggatgtataattgtgattaatttggggaaataatgagagaaagggaaagcgattgagaggtgtggataaaaatgtcacgtgcaatgttccatttctcaacctttttaaatattaagttctttttttttttttttttttttttctgagagggagtctcgctctgtcgcccaggctggagtgcagtggcgtgatctgggctcactgcaagctccgtctcccgcgttcacgccattctcctgcctcagcctcccgagtagctgggattacaggcgcccgccacaactcccggctaattttttgtatttttagtagagaaggggtttcaccgtgttagccaggatggtctcgatctcctgaccccgtgatccgcccgcctcggcctcctaaagtgctgggattacaggtgtcggccactgcgcccggccaaatattaaatacttataatgataaaagtttatttctggattctctattctgttccattggtctatgtgcctatttttataccagtgccacactgaaactgaaatgaaaaaataaaaaaaggtaagtggctaagagaaatctgtaacagagaaaactaacaaaattgatgtttgacatctttgaaaatatgaaaaaattagtgatatggttacgctttgtgtacctgcccaaacctcatcttgaattgcaatccccataatccccctgtatcaagagagagaccaggtggaggtaattggctcacagggatggcttcctccatgctgttctcaggatggtgagtgagttctcacaagatctgatggttttatgaggggttcttcccaccttcactgggcacttctccttcctgctggcctgtgaagaagatgccttgcttcccctttgccttccaccatgattgtaagtttcctgaagcctccccagccatgctgagctgtgagtcaattaaaactctttcctttatagattacccggtcgcaggcagttctttatagaagtattaaaatggactaataaaattatcaacttatttttatttacatatttacaattctactattatttaaaagcactgtgtgaacagaagctttctcagccaacaaaaatagaaactaatgcactgctaattttacagattcatataaatgaatctgagtgtcacaaaagtcattttgaaacaaatctataagattattgatgcccaggtataggaatttccttccttaagttttggcaaggaaaaatttcttactgagttcaatgttttgtttctttgtcttgtcagctaagccatgagccctaaatgtttttgtgctttacttccaacaatacatagttatgcaagctacaacatgaatattctgtttatgtgtagaaataagaagataaaataaatattttgtttaaagaaaatttctgctgaaattacataagcctgagacgtatgtctttctttcagcaccatagtactctagcttaaatggtaaaaacaatttctgtaccacggaacctgtgatttccttaaagaagttgtataacaaaataggagattttgcatttaattctagtttgtattaatcttaatgaaaacagagcaaccgctttgctgcatggtaaatttggggaagccgaagcaaggagattgcgtgagcccaggatcgttgccatcagcctgagtaacatggtgaaaacccatctctactgaaaacacaattagccaggccaagtggcgtgggcttgtagtcccagctcttctggagactgaggtggagggatcagtgggaggtagaggttgcagtaagctgagattgtggcactgccctccagcctaggcaacagagagatcttgtcacaataataataataaataaatactaattaaaagatgaaaatataggaaagaaaaatccttacctgcaaaggtagatatattgtcaaattggtaatattctaatactgtaataggggtatgtaaatcacatatctctattataaaggttaaaagacaaaactgttacaaataactatatctacgataatttgctgagatatacaaggcaaaatgtgtacaagatatataagatgtagattgtgacatcaaaaacataaaatgggaggatgtctttgataaaggttagttgttacagcctaaaatggactgctatgatcaccaagaaaaaacctatagtagatacacaaaagataaagagaagagaatcagagcatgtcattaacataaatcatcaaatcacaaaggaagacagcaagcatggaaaaaaggaataacagatctaaagaacacccagggaacatataatacaagacagtggtaagtccttaccaattaataattactgtgaatataaatctattaaattcactaattaaaagacagagtggcttaatagataaaagacccagctatatgctgcctgaaaataaaatataaaaatctaaatatggatctattttgttttctgcagatactcctactggctcaacaataatcagaatggccaaaatagcacaaagaaagctctgttaaaaaccacaaaaattaaacattatttcaacatgaaaacacaccaccccccataccacacttcatgttttaacattagattcagcaatagcattgcagtttaatatgttctacagtttgctctgttagtgtagtgtaacactattcatttttttgtgtgtgtgggagcatgacagcggacaaaataacttattgcaaagccctcatctctaagaagtctattatctcagtctcattgctaacttgtgatgatagcacttaaaacgtggatgttaagatcaactcattccatttagtccctaaaatgacggcaagtcatatttcaagagtagaattttgaagtatttctgtaatgaaacagaaatatccataagctaaactacacatttacttcagaagttaaacctcatgtaaaatagatgaacatacgcacatgtaagtacattattttttcctactttgatactgttaattgccccataaacataatttatataataaaatgcagtgtagagttactggaggtggttgaaggaatgaaagtgtttaaaattatctttaaaaactcttcacatggtattgggctcaacagtgtacagatcacattagagggaagtgatctatatgttttgacaatgtatgatataaatcatgctctgttataaaagctgtgccttaaacgatataatgttgtctaaaaaatggtacttgtgactttcctgtttaatactgttcaaagttaccaacagtaagatctacagttcttactagagcatttagaggcaagtaagtccagttggctaatctaactaggttcatttcctgagttgttttctgggtttcagcaacacagatccttcttcatgacctcaaagtttcgtttatatctttcttccagcttatcaaacataccgtttaacttccaaggaaacacttttccatctccttccctttgatttttctctcttgattcttcaaaataacttccggcctctaattacattgcattttcctatagaaactaacattgcttcactgtccagaccagtctctttagtttttttatacaggtcttattttaaatgtttgttttttcacttgtttctttggaatttttatttccaggcaagaatgtaaactgcatgaaggcaagcatcatgtaaaaataactccttcttgattttccaaatcccaacgtgctatttgatatatagcagtaactcaataagtatcttttgatttgatgaataaatgagaaaagttaacataaaatgtataacaataataatactgtggagatagtcttctaagataggcttctgtgattttcacctcctaggattcatgaccttgtgtatttactactccctttcaagctggctgcacctattgagttacttctaatgaacagaatatggcaaaaatgatggtgttttacttccatgcttaagctatacacacacatatatatatatatatatatatatagtttatctaaatacagagtttatatgtaaaatgtagatgtattgttttgtatacacacacatatatatacacacaatatacaaatatgtatctatagtgtgtatatatacatacacaatataaaaaacagtgcgtgtgtgtgtgtgtgtgtgtgtgtatacacaggactgacaaactcttttgctgttttgttgaagcaaacttccatgttaaaacaagctgctcatgtaacataaataaggctgacctatgttcagcagccaaaaatattataaatattatttaaaaatcaaaactctgatgtcctcagtccaacacctcctgagtaagtaaatcctgccaacagacacatgtgcgaacttaggggttacttcctccctatttgcaccttcagatgcaaccccagccctgacccccaccttgatcgcagccttgaaacagaggacacagctaagccacaattggtctcacaacctacagaaactctgagataataaaagtgcattatttttagtctttacatttttggatattattctgtgctgttttaggtaacagatagattttggctgttggagagtctgcaagggagcaagtttgactattatgaagaaaacattacagtagaaaaggtatagaaagaaaaataaagattggagaagatgaatctgtgcaaaaaaggccaggtaatttttgcttgtgattatccattccctatgtcatgcagctttatatttcttgaacttaaagatcaataacattttctagtctgtgacacataaatttctgctttcttgagctagtcttgctaggttattatttattaagatcaaatttaaaaattactaaaacaatgggcatcattatacaattgaaaaaacaggcaatgtttaagtaactaattaagggaaagaacataaaacgtgggtacttaggatgtgtgatccttgacggttaagatataagtttggagaaattcagaagcagaaaaagtatttaaggggaaaaaagaagcatgatagtgaacacatgaaatttagagtgacgagggagtggttcttggtgaggagacaaggaagtcagtgtaattatttaacttacaggataaataaaatcaatgcagtggtaatttggttgattaagcatcattttccattttaatgttctatgtatctcaaattatctatgtattagttagactcatttgcatgaatgggaagaaatctcaaaatgacttagcttaaaaataaaggaacaagaactttctaagacattgaacttagtatcaaacaattttactaaaatgaagctgagagacagaagtgggcatcagggacactgtaactcgaggcttgagtaatcagaaccatatctcgggcatcgtctctctgagtttcttctcatattagtttgattttaactgcagacgttctccatggggtaggaaatgcatctaccaacaagattataattttgtatcccataccttctgacattgctagtaagagtattatgtactcaaactcaagtcaaaatgccatgacagacacatattgacccagactgaggtgtgtacatatatatatacatatatatatacacacatatataatataaatatatatttataattatataaatatataacatatttataattatatgaatatataacatatttataattataggaatatataacatatttataattatagaaatatatagcatatttataattatagaaatatataacatatttataattatagaaatatatagcatatttataattatagaaatatataacatatttataattatagaaatatataacatatttataattatagaaatatatagcatatttataattatagaaatatataacatatttataattatagaaatatatagcatatttataattatagaaatatataacatatttataattatagaaatatataacatatttataattatagaaatatataacatatttataattatagaaatatataatatatttataattatagaaatatatctaatatatatttataattatagaaatatatctaatatatatttataattatatgaatatatcatatatatttataattatatgaatatatctaatatatatttataattatagaaatatatctaatatatatttataattatatgaatatatcatatatatttataattatatgaatatatctaatatatatttataattatatgaatatatctaatatatatttataattatatgaatatatctaatatatatttatagttatatgaatatatctaatatatatttatagttatatgaatatatctaatatatatttatagttatatgaatatatctaatatatatttgtagttatatgaatatatctaatatatatttgtagttatatgaatatatctaatatatatttgtagttatatgaatatatctaatatatatttgtagttatatgaatatatctaatatatatttgtagttatatgaatatatctaatatatatttgtagttatatgaatatatctaatatatatttatagttatatgaatatatctaatatatatttatagttatatgaatatatctaatatacatataatttaaatatataatacatataattatataaatatatataatatatatattttttgagacagagtctcactctgtcactaggctggagtgtagtggtgatctcggctcactgcaacctctgcctcccaggttcaagtgattctcctgcctcagcctcctgagtagctgggactacagcctcacgccaccatgcccagctaatttttgtatttttactagagatggggtttcaccatgttggccaggatggtctctatctcttgacctcgtgatccacccgccttggcctcccaaagtgctgggattacaggtgtgagacaccacgcctggctggtttacatattttgaccagttagctgtcccattatgtgaacacaacactggtgatggccatgtggactgaggacatgaaagttcatacaaatggggagttctgtgttagaaataacactaaaagcataggcaacaaaaggtaaaacatagatgaattggactttatcagactttcatgtttcaaaaaacactatcaagaaggtgaaaagacaacctatacaatagaataaaatatttgtaaatcatattagactcatatatgcactttgggagagagaaccaggcaggaaggctgcttgaggccaggagttaagagaccatcctgggcagcatagtgagaccccgtctctaaaaaaaaaaataaaaataaaatgaaaaattttaaaaaccacattgtcatttagtgacttaatatgacaaatgtatgcttatttgttttgtagcactccttttcattttcaattataccctctcattaatgttaaattgtattattacctaacttaataattaagactgaagttatgcacacttattggcaattaatattgtatatcaagccacaggtgtgcttggaaaaatatatattgctttcaaattcataagtaatacgtcttatattttcaggtcctctagttttagcttacacttttattgttgaacatgtgtcaacaaatacctagtaagaatatacttaaattttctagttatccaattttgaaattattgtttatttcatctcattactctaaatatagagtaaaaacaaaatacatagcgtcgcattgaacagttctaagaaataactatcattttgatttgcttcttttttttcccttaggataaaacaaaaaggacaatttatatcttgaattgccctcaaaataatcttaatctgagaagtaaaatgattaaatgtttaaagaaaaacaaaaagtattatacagaatatttaatctgacttgataaacactatgaagaacattcatatacttcaataagtaatgcttatttatttggagcataaaaaataatcagtgatattagtacgagaatttcaatggacaccaaaaatctgacaaaatgtttatcctcttttgtgaggtaaacaaccaaatgtattttaagaatctgagaaaaaggaatggaacctgtgtaaatggcttatgaattggtcttgtacattaaatgccacccaattgcttgcactgctcattccaaaggcattgaagagtttcattcctatcagaaataatagaagttggtgtagccagggaggaaaatgaaaccccagatgactgagtcggctgcagaatgaaagttacaatctgattcttcttattgttttcctagaaagaaattggtacaggtcactggcatactagaaatttctagaaaaggttggatatttggagtgaaaatatataaatgagtgcaactcatgattatttggagaggaaaataaactattataaaaaattacaattaaatccacattatacatatcacagccttatatttttggttctttattcttaagctccatacataaaatgttttaagatgcagaaataattattacattactttttatttaattacatattgtttttcaataagatacaaatataatcctatttttgttatcaagatatttaaaatgtgttttttgttttgctttttagtttcctcctctgacaaaattaaacactgtggggaaagaagcagttattctccatttttcccttgtgcttagatatggtgctgggcatatatttctttccagttaataggatgagaaaatgttatggcagtgacaactttttattttgtgaccaaaaattacctaccaacagaaagctatactgtgtccctaaattataatttatttgaggaataggaagatgttggtatgaagagaaattctaattagtgaatgtaattgaatgtgattaatctatattaatttcagcatccagaataagccattgtttaattaacttcttatacatataagttaaattttattacattaattgtaattacaaaaatatacatgtaaataactacataggaataaatcgcaatcaaaacaaagtttttttttcaaaaatttcttttatgagtcacagaaagtcaagacaagccagtaggatttaaagaaagtctcatgttgaaatttttataaattgacatacagaaaggttgtgtctcatcactggtatgctagtaaaatttaactgtctttctgaggaaacaaaacctattattgtaatatttgctgattttgtgatacaactatttccactgttgacaatttcaaactctcaagatggcaccactgataagggagttgggaaataatgtccatggtggtcttttgtaagccaatgcacgccagtagctccagcacgccttgttactgatgattattttattatgatgaaatgataacaattgattcaattagggattagctacatagagttgttaaatacaagataaccacaaagtagaataagaataaatctctgatgacccaagcataacgctaatacatagaaaatcagaaacacagtatcaatgttaattaattccaaagatcactcagaaaacaaagtgtcactcacaggctttgattcccaattatatacagataattggagctcagtgtacaattatatgtaaagttgggtacaacaattaaatagtcggctgtgtaaaaataaaatacatcatcaaaattaactgaagattagttagaaaaataagtatattaacagagtttgaaaacactaaacaagctacagaaattctctctcaaaaatggtcaatgcttttaaaattataaaaaatagattattaagtttcaaaatgtagaaatgaattactgccatgatctttcattatctgaccctttccttcctgtccagactctcccctagcagactcccttacgacacctctagccatgtaccctcttggctctgccatataccctcctggctcatcttataatgtgtcaaattctgctctgccatgtaccctcttggctcttcttacaatgtgttgacttcctttgaatttcagcaatttgagccttcttgcagttgttaccaaaataccaggagttcagtctaggtcctgctgttcactgcacagaaaaccaatgactgagaggatgagcattgccaaaaaagaaggctttaatcaggtgatgcagctgaggagatgagagatcagtctcgaacccatcttcctgactgaatacaattaggggtttatatagcagggaagaaatgtaactgtgtggggaacgcagggaggataaggaacaatcatgatgaatgagggtcctggcatctcatcatctgaatgcaataatctggttagtttcaggtttttgtatacttttttagaggcctttgggatcctttcctggggaaggaactcagataaaacaaacgtaagtttcaagcttaaagcccagaagggtcaatttctatgttcatccaacagaaatgtgtatgaaaaaactgggtgggtttaatagtgttttggtatccacacttctatcattgagacactattcaccttctcttacacctcacctatattaatgtactccaaagcacttatttttctgaaattgtattatttactttttgggcagatattcataatgtgtctcacttaataatcgtaagttccatgaaagcaagtgaattagtttttattactcttattattattgttgttgtgtaaggaactattacaaacagtggcttagaacaatgaaaatttattatctcagtttccttgagtagggattctgggcagggttctctgcttatagtctcaaccaagctaaaataaaaatgtcagccgagctatgatctcatcagagagtctcagcattcagttctaagctcactgtgttttagcagaatccacttccttatgttagtgaatgaaccaaacataggtcggcctccgtggtccagcaaagcgaaatactgacatccaaactgcaccacaacaatcaggcatttattgcagggc
